(19) United States
(12) Patent Application Publication
(10) Pub. No.: US 2012/0309003 A1
(43) Pub. Date: Dec. 6, 2012

(54) ENTEROHEMORRHAGIC E. COLI O104:H4 ASSAYS

(75) Inventors: CRAIG CUMMINGS, PACIFICA, CA (US); PIUS BRZOSKA, WOODSIDE, CA (US); ALAIN RICO, CHATENAY MALABRY (FR); YONGMEI ("ALEXIS") JI, CHICAGO, IL (US)

(73) Assignee: LIFE TECHNOLOGIES CORPORATION, CARLSBAD, CA (US)

(21) Appl. No.: 13/486,594

(22) Filed: Jun. 1, 2012

Related U.S. Application Data
(60) Provisional application No. 61/492,777, filed on Jun. 2, 2011.
(60) Provisional application No. 61/495,341, filed on Jun. 9, 2011.

(51) Int. Cl. C12Q 1/68; C07H 21/04

(52) U.S. Cl. 435/6.11; 536/23.7; 536/24.33; 536/24.32; 435/6.12

(57) ABSTRACT

Disclosed are compositions, methods and kits for the specific detection of enterohemorrahagic E. coli O104:H4 from contaminated samples including clinical samples, biological samples, food samples, complex food matrices, water, beverage samples, fermentation broth samples, forensic samples, environmental samples (e.g., soil, dirt, garbage, sewage, air, or water) as well as food processing and manufacturing surfaces.

### CROSS-REFERENCE TO RELATED APPLICATIONS

[0001] This application claims the benefit under 35 U.S.C. §119(e) of United States Provisional patent application U.S. Ser. No. 61/492,777 filed Jun. 2, 2011, and of United States Provisional patent application U.S. Ser. No. 61/495,341 filed Jun. 9, 2011, the entire contents of which are incorporated herein by reference.

### SEQUENCE LISTING

[0002] The instant application contains a Sequence Listing which has been submitted in ASCII format via EFS-Web and is hereby incorporated by reference in its entirety. Said ASCII copy, created on May 24, 2012, is named LT00528U.txt and is 14,451,716 bytes in size.

### FIELD

[0003] The present teachings relate to compositions, methods and kits for specific detection and differentiation of pathogenic organisms. More particularly, the specification describes compositions and kits comprising nucleic acid sequences specific and/or unique to enterohemorrhagic E. coli O104:H4 and methods of use thereof. Methods for differentially detecting strains of enterohemorrhagic E. coli O104:H4 from other pathogens (including closely related serotypes and strains) are also described.

### BACKGROUND

[0004] Identification of bacterial contamination in food often occurs subsequent to an outbreak of a food borne illness. The bacterium Escherichia coli is frequently identified as a food contaminant of many food borne illnesses.

[0005] The recent deadly outbreak of E. coli related illnesses and deaths in Europe, in 2011, has been shown to be caused by a new hybrid type of pathogenic E. coli strain that is enterohemorrhagic. This new strain of bacterium is causative of Hemolytic Uremic Syndrome (HUS) which includes kidney failure and bloody diarrhea.

[0006] Another serotype known as E. coli O157:H7 is most often associated with outbreaks of food borne illness in the United States and elsewhere in the world and causes enterohemorrhagic colitis and possibly kidney failure. Detection of pathogenic E. coli, particularly serotypes causative of hemorrhagic colitis has become a public health priority. Regulations by the United States government require meat and other food processors to screen for the presence of strains such as O157:H7 in their finished products and more stringent guidelines are being considered in a number of states for the identification of O157:H7 in other commodities and food stuffs.

[0007] Many strains of genetically similar E. coli exist that vary dramatically in their pathogenicity. Genomic comparisons are revealing the consequences of genetic changes often underlie the emergence of new pathogenic bacteria. For example, E. coli O157:H7 has been determined to have evolved stepwise from the O55:H7 which is associated with infantile diarrhea. These two serotypes are more closely related at the nucleotide level while divergence was markedly different at the gene level. Likewise, other pathogenic serotypes have been shown to be less divergent at the nucleotide level making identification of pathogenic strains difficult.

[0008] Assays for the rapid, sensitive and specific detection of infectious pathogens are extremely important from both a public health and economic perspective. When new pathogenic strains arise there is a need for novel assays and methods for detecting and differentiating new pathogenic organisms from other pathogenic and non-pathogenic organisms to make a differential diagnosis of what is causing a particular disease. Furthermore, there is a need to develop methods to detect the presence of pathogenic organisms in food and other sources of contamination, especially when a new pathogenic strain is detected.

### SUMMARY

[0009] The present disclosure, in some embodiments, describes the identification of an enterohemorrhagic strain of E. coli from the recent European outbreaks of 2011 which is named E. coli O104:H4 also referred to as LB226692. In some embodiments, the present disclosure describes nucleic acid sequences corresponding to assembled genomes of E. coli O104:H4. SEQ ID. NOs: 108-SEQ ID NO: 471 comprise nucleic acid sequences corresponding to a genome assembly of E. coli O104:H4 (LB226692).

[0010] The present disclosure also describes nucleic acid sequences isolated from another enterohemorrhagic strain of E. coli from an older European outbreak of enterohemorrhagic disease in 2001, which is called HUSEC41, and is found to be phenotypically E. coli O104:H4 Stx2+eae⁻. The nucleic acid sequences of the genome assembly of HUSEC41 is described in SEQ ID NOs: 472-SEQ ID NO: 927.

[0011] In some embodiments, unique enterohemorrhagic E. coli O104:H4 nucleic acid sequences, also referred to herein as target signature sequences are described and comprise isolated nucleic acid molecules comprising a nucleotide sequence of SEQ ID NOS: 1-5, fragments thereof, and/or complements thereof. In some embodiments, unique enterohemorrhagic E. coli O104:H4 sequences may comprise isolated nucleic acid molecules comprising a nucleotide sequence having at least a 90% sequence identity, at least 80% sequence identity and/or at least 70% sequence identity to the nucleotide sequences of SEQ ID NO:1, SEQ ID NO:2, SEQ ID NO:3, SEQ ID NO:4, SEQ ID NO: 5, fragments thereof and/or complements thereof.

[0012] In some embodiments, E. coli O104:H4 isolated nucleic acid sequences may comprise nucleic acid molecules comprising at least 40 nucleotide sequence of SEQ ID NOS: 1-5; at least 30 nucleotide sequence of SEQ ID NOS: 1-5; at least 25 nucleotide sequence of SEQ ID NOS: 1-5; at least 20 nucleotide sequence of SEQ ID NOS: 1-5; at least 16 nucleotide sequence of SEQ ID NOS: 1-5; at least 15 nucleotide sequence of SEQ ID NOS: 1-5; at least 10 nucleotide sequence of SEQ ID NOS: 1-5; any intermediate number of contiguous sequences from at least about 10 nucleotides of sequence to at least about 40 nucleotides of sequence of SEQ ID NOS: 1-5 and sequences having 90% identity to the foregoing sequences.

[0013] In some embodiments, the disclosure describes compositions of isolated nucleic acid sequences having SEQ ID NOs: 6-104 fragments thereof, at least 10 contiguous nucleotide sequences thereof, complements thereof and isolated nucleic acid sequence comprising at least 90% nucleic acid sequence identity to the sequences set forth above.

[0014] In some embodiments, isolated nucleic acid sequence compositions of the disclosure may further comprise one or more label, such as, but not limited to, a dye, a radioactive isotope, a chemiluminescent label, a fluorescent moiety, a bioluminescent label an enzyme, and combinations thereof. In some embodiments, isolated nucleic acid sequences may be modified.

[0015] The disclosure also describes recombinant constructs comprising nucleic acid sequences unique to E. coli O104:H4 or isolated nucleic acid sequences described in this specification.

[0016] The present disclosure, in some embodiments, describes assay utilizing molecular methods such as sequence specific amplification and detection that offer significant improvements in speed, sensitivity and specificity over traditional microbiological methods. Embodiments relate to design and development of molecular detection assays comprising identification of a target sequence that is present in the enterohemorrhagic strains E. coli O104:H4 to be detected and absent or divergent in organisms not to be detected.

[0017] In some embodiments, methods of detecting the presence of enterohemorrhagic E. coli serotypes and strains in a sample are disclosed. In some embodiments, methods of detecting the presence of EHEC enterohemorrhagic E. coli serotypes referred to as EHEC strains in a sample are disclosed. In some embodiments, methods of detecting the presence of EAEC E. coli serotypes referred to as EHEC strains, which are less virulent strains, in a sample are disclosed.

[0018] In some embodiments, methods of detecting the presence of enterohemorrhagic E. coli O104:H4 in a sample are disclosed.

[0019] The specification also discloses methods for detection of an enterohemorrhagic E. coli O104:H4 organism from a sample and methods to exclude the presence of an enterohemorrhagic E. coli O104:H4 organism in a sample, wherein the detection of at least one nucleic acid sequence that is unique to an E. coli O104:H4 is indicative of the presence of an E. coli O104:H4 and the absence of detection of any nucleic acid sequence unique to an E. coli O104:H4 is indicative of the absence of an E. coli O104:H4 in the sample. Accordingly, a method of the disclosure, in some embodiments, may comprise detecting, in a sample, at least one (or more) nucleic acid sequence(s) having at least 10 to at least 25 nucleic acids of SEQ ID NO:1, SEQ ID NO:2, SEQ ID NO:3, SEQ ID NO:4, SEQ ID NO:5, and/or complementary sequences thereof and/or a sequence having 90% homology thereto, wherein detection of at least one nucleic acid sequence indicates the presence of an E. coli O104:H4 organism in the sample. Methods of detection may also comprise identification steps and may further comprise steps of sample preparation. Such embodiments are described in detail in sections below.

[0020] One embodiment method of detecting E. coli O104:H4 in a sample may comprise: detecting the presence of SEQ ID NO: 1 and/or a complement thereof and/or a fragment thereof; wherein detection of SEQ ID NO: 1 or a complement thereof or a fragment thereof confirms the presence of E. coli O104:H4 in a sample.

[0021] One embodiment method of detecting E. coli O104:H4 in a sample may comprise: detecting the presence of SEQ ID NO: 2 or a complement thereof or a fragment thereof; wherein detection of SEQ ID NO: 2 or a complement thereof or a fragment thereof confirms the presence of E. coli O104:H4 in a sample.

[0022] One embodiment method of detecting E. coli O104:H4 in a sample may comprise: detecting the presence of SEQ ID NO: 3 or a complement thereof or a fragment thereof; wherein detection of SEQ ID NO: 3 or a complement thereof or a fragment thereof confirms the presence of E. coli O104:H4 in a sample.

[0023] One embodiment method of detecting E. coli O104:H4 in a sample may comprise: detecting the presence of SEQ ID NO: 4 or a complement thereof or a complement thereof or a fragment thereof; wherein detection of SEQ ID NO: 4 or a complement thereof or a fragment thereof confirms the presence of E. coli O104:H4 in a sample.

[0024] One embodiment method of detecting E. coli O104:H4 in a sample may comprise: detecting the presence of SEQ ID NO: 5 or a complement thereof or a fragment thereof; wherein detection of SEQ ID NO: 5 or a complement thereof or a fragment thereof confirms the presence of E. coli O104:H4 in a sample.

[0025] In one embodiment, a method of detecting E. coli O104:H4 in a sample may comprise: detecting the presence of at least two sequences from SEQ ID NO: 1, SEQ ID NO: 2, SEQ ID NO: 3, SEQ ID NO: 4, SEQ ID NO: 5, or any complements and/or fragments thereof and/or a sequence having 90% homology thereto; wherein detection of at least two of these sequences confirms the presence of E. coli O104:H4 in a sample. In some embodiments, two of the sequences listed above may be detected. In some embodiments, at least three of the above sequences may be detected. In some embodiments detection of all the sequences SEQ ID. NO: 1-5 may detect the presence of E. coli O104:H4 in a sample.

[0026] In one embodiment, a method of detecting E. coli O104:H4 in a sample may comprise: detecting the presence of at least two sequences from SEQ ID NO: 1, SEQ ID NO: 2, SEQ ID NO: 3, SEQ ID NO: 4 SEQ ID NO: 5, or any complements thereof or any fragment thereof or a sequence having 90% homology thereto; wherein detection of at least two of these sequences confirms the presence of E. coli O104:H4 in a sample and not the presence of other E. coli O104 strains.

[0027] In other embodiments, not detecting at least one of a nucleic acid sequence selected from nucleotides described by either SEQ ID NOs: 1-5, at least 20 contiguous fragments thereof, or complements thereof can be used to exclude the presence of E. coli O104:H4 in a sample.

[0028] Fragments of a nucleic acid sequence may be described without limitation in various embodiments as nucleic acid sequences having at least 10 contiguous nucleic acids, nucleic acid sequences having at least 20 contiguous nucleic acids, and/or nucleic acid sequences having at least 25 contiguous nucleic acids.

[0029] Detection of the presence of target nucleic acids in a sample may be performed by a variety of methods, such as but not limited to, a nucleic acid amplification reaction and detection of an amplification product as indicative of the presence of the target nucleic acid. An amplification reaction can be an end-point determination. An amplification reaction can be a quantitative amplification reaction. For example a quantitative amplification can be a real-time PCR assay, such as but not limited to a SYBR® Green Assay or a TaqMan® Assay. Amplification reactions may be performed by using primer sequences designed to hybridize to and amplify target nucleic acid sequences such as but not limited to SEQ ID NOs: 1-5 described herein.

[0030] Detection of the presence of target nucleic acids in a sample may in some embodiments be performed by hybridization using probes specific to target sequences comprised in SEQ ID NO: 1, SEQ ID NO: 2, SEQ ID NO: 3, SEQ ID NO: 4, SEQ ID NO: 5, fragments and/or complements thereof and/or to sequences having 90% homology thereto. In some embodiments, combinations of amplification (to amplify a target nucleic acid sequence and/or a complement and/or a fragment thereof) and hybridization to detect one or more amplified products may be used for detection of the presence of target nucleic acids in a sample.

[0031] In one embodiment, disclosed is an assay for the detection of E. coli O104:H4 in a sample comprising a) hybridizing a first pair of PCR primers comprising a forward primer and a reverse primer operable to hybridize to at least a first target polynucleotide sequence (which may be in a non-limiting example a first target nucleic acid having either one of SEQ ID NOs: 1-5 or a complement or a fragment thereof or a sequence having 90% homology thereto); b) optionally hybridizing a second pair of PCR primers comprising a forward primer and a reverse primer operable to hybridize to at least a second target polynucleotide sequence (which may be in a non-limiting example a target nucleic acid having either one of SEQ ID NOs: 1-5 or a complement or a fragment thereof or a sequence having 90% homology thereto and being different from the first target polynucleotide sequence); c) amplifying the at least first and optionally the at least second target polynucleotide sequences; and d) detecting the at least first and optionally the at least second amplified target polynucleotide sequence products; wherein the detection of the at least first amplified target polynucleotide sequence product and optionally the detection of the at least second amplified target polynucleotide sequence product is indicative of the presence of E. coli O104:H4 in the sample.

[0032] In one embodiment, disclosed is an assay for the detection of E. coli O104:H4 in a sample comprising a) hybridizing a first pair of PCR primers selected from primer sequences from a row in Table 1 comprising a forward primer (selected from SEQ ID NOs: 6-26 and/or complements thereof and/or primers having 90% sequence homology thereto) and a corresponding reverse primer (selected from the same row from SEQ ID NOs: 27-47 and/or complements thereof and/or primers having 90% sequence homology thereto), to at least a first target polynucleotide sequence (also described in the same row as the first pair of primers are selected from in Table 1, described by fragment_number in the first column of the row); b) hybridizing a second pair of PCR primers selected from primer sequences in another row in Table 1 comprising a second forward primer and a second reverse primer (as described above), to at least a second target polynucleotide sequence (also described in the same row as the second pair of primers of Table 1); c) amplifying said at least first and said at least second target polynucleotide sequences; and d) detecting said at least first and said at least second amplified target polynucleotide sequence products; wherein the detection of the at least first amplified target polynucleotide sequence product and the detection of the at least second amplified target polynucleotide sequence product is indicative of the presence of E. coli O104:H4 in the sample.

[0033] In further embodiments, a method may further comprise detection of the first and second amplified products by hybridization using one or more probes. Probes that may be used are described in Table 1, where different probes specific to a particular target sequence of E. coli O104:H4 are described in SEQ ID NOs: 48-68. Primer-probe combinations outlined in a row of Table 1 may be used to amplify and detect a corresponding target nucleic acid sequence.

[0034] In some embodiments, hybridization may comprise using at least a first probe to detect a first amplification product and a second probe to detect a second amplified product, the first probe further comprising a first label and said second probe further comprising a second label, wherein both labels are selected from a dye, a radioactive isotope, a chemiluminescent label, and an enzyme, the dye comprises a fluorescein dye, a rhodamine dye, or a cyanine dye. In some non-limiting exemplary embodiments a label may be a dye such as a fluorescein dye and a first probe may be labeled with a FAM™ dye and a second probe may be labeled with a VIC® dye.

[0035] In some embodiments, a method of detection may further comprise preparing a sample for PCR amplification (prior to hybridizing with primers for amplification), and may comprise for example, but not limited to (1) bacterial enrichment, (2) separation of bacterial cells from the sample, (3) cell lysis, and (4) total DNA extraction.

[0036] Samples may include without limitation, clinical samples, food/beverage samples, water samples, and environmental sample. Food sample may comprise raw produce, meats as well as a selectively enriched food matrix.

[0037] Methods may include assays such as polymerase chain reactions, wherein hybridizing and amplifying of said first pair of polynucleotide primers occurs in a first vessel and said hybridizing and amplifying of said second pair of polynucleotide primers occurs in a second vessel, or hybridizing and amplifying of said first pair of polynucleotide primers and said hybridizing and amplifying of said second pair of polynucleotide primers occurs in a single vessel.

[0038] In another embodiment, the disclosure describes methods for detection of E. coli O104:H4 in a sample comprising: a) hybridizing a first pair of PCR primers to a first target polynucleotide sequence within SEQ ID NO:1 or SEQ ID NO:2 or SEQ ID NO:3 or SEQ ID NO:4 or SEQ ID NO:5; b) hybridizing a second pair of PCR primers to a second target polynucleotide sequence within a sequence selected from SEQ ID NO:1 or SEQ ID NO:2 or SEQ ID NO:3 or SEQ ID NO:4 or SEQ ID NO:5 but which is different from the first target polynucleotide sequence; c) amplifying said at least first and said at least second target polynucleotide sequences; and d) detecting said at least first and said at least second amplified target polynucleotide sequence products; wherein the detection of the at least first amplified target polynucleotide sequence product and the detection of the at least second amplified target polynucleotide sequence product is indicative of the presence of E. coli O104:H4 in the sample.

[0039] A method as described above may further comprise providing a first probe and a second probe the probes, wherein the first and second probes are different from each other, the first probe operable to identify the first amplified target polynucleotide sequence and the second probe operable to identify the second amplified target nucleotide sequence, the first probe further comprises a first label and said second probe further comprises a second label, wherein both labels are selected from a dye, a radioactive isotope, a chemiluminescent label, and an enzyme, the dye comprises a fluorescein dye, a rhodamine dye, or a cyanine dye; and hybridizing the first and second probes to the PCR amplified fragments to detect the presence of the first amplified target polynucleotide sequence and the second amplified target polynucleotide sequence from the sample.

[0040] Some embodiments describe methods for detecting E. coli O104:H4, comprising assays to detect the presence of multiple target genes of E. coli O104:H4 thereby detecting the presence of E. coli O104:H4. In some embodiments an assay may comprise detecting the presence of a fliC_H4 gene which detects an E. coli having a H4 allele of a fliC gene and/or detecting the presence of a terD gene that detects the presence of an E. coli having a terD tellurite resistance gene and/or detecting the presence of an O104 antigen encoding gene. In some embodiments, an assay may further comprise detecting the presence of a stx2 allele of a shigatoxin or a verotoxin gene comprising detecting an E. coli strain having a stx2 shiga-toxin encoding locus. In some embodiments, a method of the disclosure may further comprise detecting the presence of a locus called AAF-I which encodes aggregative fimbriae.

[0041] Methods comprising assay designs (including primer pairs and probes) for detecting the presence of two or more genes described above to detect and identify the presence of E. coli O104:H4 are described in the Table 2 of this application, according to some embodiments as well as in Tables 3 and 4 of this application.

[0042] Table 2 described several forward and reverse primer pairs and corresponding probe sequences that may be used to identify fliC-H4 genes, ter D genes, and O104 antigen genes. Table 3 described several forward and reverse primer pairs and corresponding probe sequences that may be used to identify stx2/VT2 genes. Table 4 describes described several forward and reverse primer pairs and corresponding probe sequences that may be used to identify the AAF-I locus.

[0043] In some embodiments, a method of the disclosure may comprise identifying one or more of these gene loci which are specific to the European 2011 outbreak E. coli O104:H4 strains. A method may further comprise providing multiple probes, wherein each probe is operable to hybridize to and identify one amplified target polynucleotide sequence specific to a different gene locus to be detected and each probe further comprises a different label such as but not limited to a dye, a radioactive isotope, a chemiluminescent label, and an enzyme, the dye comprises a fluorescein dye, a rhodamine dye, or a cyanine dye, to facilitate simultaneous detection of multiple target genes in a sample.

[0044] In another embodiment, disclosed is a kit for the detection of E. coli O104:H4 in a sample comprising: a) at least one pair of PCR primers specific to a target nucleic acid specific to an E. coli O104:H4 organism, wherein the PCR primers are operable to hybridize to and amplify under suitable conditions a target nucleic acid specific to an E. coli O104:H4 organism to form amplified target nucleic acid products; b) optionally further comprising probes specific to hybridize to and detect an amplified target nucleic acid product specific to an E. coli O104:H4 organism; and c) one or more components selected from at least one enzyme, dNTPs, at least one buffer, at least one salt, at least one control nucleic acid sample and an instruction protocol.

[0045] In some embodiments, primers of a kit may be sequences selected from a row in Tables 1 comprising a forward primer and a corresponding reverse primer (SEQ ID NO: 6-47) or fragments or complements or sequences having 90% homology thereto that are operable to hybridize to and amplify at least a first target polynucleotide sequence (also described in the same row as the first pair of primers of Table 1). If multiple primers (and probes) are comprised in a kit, a first PCR primer (and probe) is selected from any row of Table 1 and a subsequent (second, third . . . ) pair of PCR primers selected from another row in Table 1. In some embodiments, probes may be selected from SEQ ID NOs: 48-68. Primers and probes may be labeled and/or modified. A first probe may further comprise a first label and a second (or subsequent) probe further comprise a second (or subsequent) label. Kits may comprise more than one sets of primers and/or probes shown in Table 1. Kits in some embodiments may comprise all the primer and probes shown in Table 1.

[0046] In another embodiment, disclosed is a kit for the detection of E. coli O104:H4 in a sample comprising a) at least one pair of PCR primers selected from sequences selected from a row in the Tables 2, 3 and/or 4 described as forward primers and reverse primers such as SEQ ID NOS:69-82, and/or SEQ ID NOS:105-107 and/or SEQ ID NOS: 90-99, respectively, fragments and/or complements and/or sequences having 90% homology thereto, that are specific to bind to, hybridize and amplify at least one target polynucleotide sequence to form an amplified target nucleic acid sequence; and b) a optionally at least one probe specific to hybridize to and detect an amplified target nucleic acid product described in step a); and c) one or more components selected from at least one enzyme, dNTPs, at least one buffer, at least one salt, at least one control nucleic acid sample and an instruction protocol. Kits may comprise more than one sets of primers and/or probes shown in Tables 2, 3 and 4. Kits in some embodiments may comprise all the primer and probes shown in Tables 2, 3 and 4.

[0047] Kits may without limitation contain other buffers, other molecular bio reagents, and each component may be individually packaged or packaged in one or more container means.

[0048] In the following description, certain aspects and embodiments will become evident. It should be understood that a given embodiment need not have all aspects and features described herein. It should be understood that these aspects and embodiments are merely exemplary and explanatory and are not restrictive of the invention.

[0049] It is to be understood that both the foregoing general description and the following detailed description are exemplary and explanatory only and are not restrictive of the invention, as claimed.

### DETAILED DESCRIPTION

[0050] The present disclosure, in some embodiments, describes the identification of an enterohemorrhagic strain of E. coli from the 2011 European outbreaks which is an E. coli O104:H4 also referred to as LB226692. In some embodiments, the present disclosure describes nucleic acid sequences corresponding to assembled genomes of E. coli O104:H4. SEQ ID. NOs: 108-SEQ ID NO: 471 comprise nucleic acid sequences corresponding to a genome assembly of E. coli O104:H4 (LB226692).

[0051] Data obtained from DNA sequencing of this new bacterial strain, E. coli O104:H4 or LB226692, using the Ion Personal Genome Machine (Ion PGM™, Life Technologies Corporation) shows the presence of genes typically found in two different types of E. coli including enteroaggregative E. coli (EAEC) and enterohemorrhagic E. coli (EHEC). These results and further data analysis on the Ion PGM™, provide insight into this bacterium's aggressiveness and may help prevent further outbreaks.

[0052] The present disclosure also describes nucleic acid sequences isolated from another enterohemorrhagic strain of E. coli from an older European outbreak of enterohemorrhagic disease in 2001, which is called HUSEC41, and is found to be phenotypically E. coli O104:H4 Stx2+eae⁻. The nucleic acid sequences of the genome assembly of HUSEC41 is described in SEQ ID NOs: 472-SEQ ID NO: 927.

[0053] In some embodiments, the present disclosure describes isolated E. coli O104:H4 nucleic acid sequences comprising SEQ ID. NOs: 108-SEQ ID NO: 471, complements thereof, fragments thereof and nucleotides having 90% homology thereto, 80% homology thereto and 70% homology thereto.

[0054] In some embodiments, the present disclosure describes isolated E. coli O104:H4 nucleic acid sequences comprising SEQ ID. NOs: 472-SEQ ID NO: 927, complements thereof, fragments thereof and nucleotides having 90% homology thereto, 80% homology thereto and 70% homology thereto.

[0055] The present disclosure has, in some embodiments, identified strain and serotype unique DNA sequences of E. coli O104:H4 which have been utilized to design probes and primers and to design several methods for detection of various E. coli O104:H4 organisms, including for example, specific methods to detect specifically the 2011 European outbreak strain LB226692 as well as methods to specifically detect the HUSEC41 strain, using molecular biology techniques such as but not limited to PCR and hybridization.

[0056] The sequence of E. coli O104:H4 genome is described in SEQ ID NOs: 108-471. A bioinformatic approach to identify E. coli O104:H4 unique sequence regions was undertaken and evaluated by Sanger sequencing and real-time PCR assays.

[0057] In one embodiment of the current teachings bioinformatic and direct DNA sequencing comparisons were conducted in an effort to identify E. coli O104:H4 serotype-specific sequences. Alignment of the sequenced regions using algorithms identified at least five O104:H4 “unique” regions shown for example in SEQ ID NOs: 1-5. PCR primer pairs were designed for each of the unique regions to specifically amplify the unique sequences against both inclusion (organism to be detected, i.e., E. coli O104:H4) and exclusion genomes (organisms not to be detected, other E. coli non-O104:H4 serotypes).

[0058] In some embodiments, compositions of isolated nucleic acids may in some embodiments be describes as E. coli O104:H4 specific target nucleic acid sequences/regions. Some examples of E. coli O104:H4 specific target nucleic acid sequences/regions comprise isolated nucleic acid sequences having SEQ ID NOs: 1-5; including isolated nucleic acids comprising at least 40 nucleotide sequence of SEQ ID NOS: 1-5; at least 30 nucleotide sequence of SEQ ID NOS: 1-5; at least 25 nucleotide sequence of SEQ ID NOS: 1-5; at least 20 nucleotide sequence of SEQ ID NOS: 1-5; at least 16 nucleotide sequence of SEQ ID NOS: 1-5; at least 15 nucleotide sequence of SEQ ID NOS: 1-5; at least 10 nucleotide sequence of SEQ ID NOS: 1-5; any intermediate number of contiguous sequences from at least about 10 nucleotides of sequence to at least about 40 nucleotides of sequence of SEQ ID NOS: 1-5; sequences having 90% identity to the foregoing sequences; and complementary sequences thereto.

[0059] PCR primer pairs and probes for use in detection methods (such as but not limited to real-time PCR assays) were designed to these E. coli O104:H4 specific target nucleic acid regions. In some embodiments, the disclosure describes primer and probes designed herein as compositions of isolated nucleic acid sequences having SEQ ID NOs: 6-104 fragments thereof, at least 10 contiguous nucleotide sequences thereof, complements thereof and isolated nucleic acid sequence comprising at least 90% nucleic acid sequence identity to the sequences set forth above.

[0060] In some embodiments, the disclosure describes primer and probes designed herein as compositions of isolated nucleic acid sequences having SEQ ID NOs: 6-107 fragments thereof, at least 10 contiguous nucleotide sequences thereof, complements thereof and isolated nucleic acid sequence comprising at least 90% nucleic acid sequence identity to the sequences set forth above.

[0061] In some embodiments, isolated nucleic acid sequence compositions of the disclosure may further comprise one or more label, such as, but not limited to, a dye, a radioactive isotope, a chemiluminescent label, a fluorescent moiety, a bioluminescent label an enzyme, and combinations thereof. In some embodiments, isolated nucleic acid sequences may be modified.

[0062] The disclosure also describes recombinant constructs comprising nucleic acid sequences unique to E. coli O104:H4 or isolated nucleic acid sequences described in this specification including SEQ ID NOs: 1-927.

[0063] In some embodiments, primers and probes described above (and in Tables 1-4 below) can be used in one or more methods described herein (such as in one example real-time PCR assays on DNA extracts from various samples suspected of being contaminated) for identification of E. coli O104:H4. In all screening methods an internal positive control will have a detectable signal/positive result.

[0064] A method of the disclosure, in some embodiments, may comprise detecting, in a sample, at least one (or more) nucleic acid sequence(s) having at least 10 to at least 25 nucleic acids of SEQ ID NO:1, SEQ ID NO:2, SEQ ID NO:3, SEQ ID NO:4, SEQ ID NO:5, and/or complementary sequences thereof and/or a sequence having 90% homology thereto, wherein detection of at least one nucleic acid sequence indicates the presence of an E. coli O104:H4 organism in the sample. Methods of detection may also comprise identification steps and may further comprise steps of sample preparation.

[0065] One embodiment method of detecting E. coli O104:H4 in a sample may comprise: detecting the presence of SEQ ID NO: 1 and/or a complement thereof and/or a fragment thereof; wherein detection of SEQ ID NO: 1 or a complement thereof or a fragment thereof confirms the presence of E. coli O104:H4 in a sample.

[0066] One embodiment method of detecting E. coli O104:H4 in a sample may comprise: detecting the presence of SEQ ID NO: 2 or a complement thereof or a fragment thereof; wherein detection of SEQ ID NO: 2 or a complement thereof or a fragment thereof confirms the presence of E. coli O104:H4 in a sample.

[0067] One embodiment method of detecting E. coli O104:H4 in a sample may comprise: detecting the presence of SEQ ID NO: 3 or a complement thereof or a fragment thereof; wherein detection of SEQ ID NO: 3 or a complement thereof or a fragment thereof confirms the presence of E. coli O104:H4 in a sample.

[0068] One embodiment method of detecting E. coli O104:H4 in a sample may comprise: detecting the presence of SEQ ID NO: 4 or a complement thereof or a complement thereof or a fragment thereof; wherein detection of SEQ ID NO: 4 or a complement thereof or a fragment thereof confirms the presence of E. coli O104:H4 in a sample.

[0069] One embodiment method of detecting E. coli O104:H4 in a sample may comprise: detecting the presence of SEQ ID NO: 5 or a complement thereof or a fragment thereof; wherein detection of SEQ ID NO: 5 or a complement thereof or a fragment thereof confirms the presence of E. coli O104:H4 in a sample.

[0070] In one embodiment, a method of detecting E. coli O104:H4 in a sample may comprise: detecting the presence of at least two sequences from SEQ ID NO: 1, SEQ ID NO: 2, SEQ ID NO: 3, SEQ ID NO: 4, SEQ ID NO: 5, or any complements and/or fragments thereof and/or a sequence having 90% homology thereto; wherein detection of at least two of these sequences confirms the presence of E. coli O104:H4 in a sample. In some embodiments, two of the sequences listed above may be detected. In some embodiments, at least three of the above sequences may be detected. In some embodiments detection of all the sequences SEQ ID. NO: 1-5 may detect the presence of E. coli O104:H4 in a sample.

[0071] Detection of the presence of target nucleic acids in a sample may be performed by a variety of methods, such as but not limited to, a nucleic acid amplification reaction and detection of an amplification product as indicative of the presence of the target nucleic acid. An amplification reaction can be an end-point determination. An amplification reaction can be a quantitative amplification reaction. For example a quantitative amplification can be a real-time PCR assay, such as but not limited to a SYBR® Green Assay or a TaqMan® Assay. Amplification reactions may be performed by using primer sequences designed to hybridize to and amplify target nucleic acid sequences such as but not limited to SEQ ID NOs: 1-5 described herein.

[0072] Detection of the presence of target nucleic acids in a sample may in some embodiments be performed by hybridization using probes specific to target sequences comprised in SEQ ID NO: 1, SEQ ID NO: 2, SEQ ID NO: 3, SEQ ID NO: 4, SEQ ID NO: 5, fragments and/or complements thereof and/or to sequences having 90% homology thereto. In some embodiments, combinations of amplification (to amplify a target nucleic acid sequence and/or a complement and/or a fragment thereof) and hybridization to detect one or more amplified products may be used for detection of the presence of target nucleic acids in a sample.

[0073] The disclosed methods to identify E. coli O104:H4 results from a two-pronged approach to identify target sequences for E. coli O104:H4 that do not also detect closely related either pathogenic or non-pathogenic E. coli. In some embodiments, identified E. coli O104:H4 target sequences (for example, SEQ ID NOs: 1-5), were used to design primers and probes for real-time PCR assays. The subsequently designed PCR primers and probes for use in assays by real-time PCR detected unambiguously, specifically and with great sensitivity E. coli O104:H4. Some examples of primer and probes designed for this are described by SEQ ID NOs: 6-68 (see also Table 1 below).

[0074] In one embodiment, disclosed is an assay for the detection of E. coli O104:H4 in a sample comprising a) hybridizing a first pair of PCR primers comprising a forward primer and a reverse primer operable to hybridize to a first target polynucleotide sequence (which may be in a non-limiting example a first target nucleic acid having either one of SEQ ID NOs: 1-5 or a complement or a fragment thereof or a sequence having 90% homology thereto); b) amplifying the first target polynucleotide sequences; and d) detecting the first amplified target polynucleotide sequence products; wherein the detection of the first amplified target polynucleotide sequence product and optionally the detection of the at least second amplified target polynucleotide sequence product is indicative of the presence of E. coli O104:H4 in the sample. Accordingly, in one example detection of any one of the five unique target nucleic acid sequences SEQ ID NO: 1-5 may be used to detect the presence of an E. coli O104:H4 in the sample.

[0075] In some embodiments, neither assay alone may be definitive for a single serotype of E. coli due to genomic similarity between the genomic regions of other E. coli serotypes. Yet, when two assays, (for example, but not limited to the assays shown in Table 1), are used either in parallel or as a multiplex assay, (e.g., in a real-time TaqMan® assay), where each probe in each of the two assays has a different label for distinguishing results on a real-time PCR instrument, (e.g., a 7500 Fast Real-Time PCR System (Applied Biosystems)), a positive result from each assay is indicative of the presence of an enterohemorrahagic E. coli O104:H4.

[0076] For example, such a method may comprise: a) hybridizing a first pair of PCR primers comprising a forward primer and a reverse primer operable to hybridize to at least a first target polynucleotide sequence (which may be in a non-limiting example a first target nucleic acid having either one of SEQ ID NOs: 1-5 or a complement or a fragment thereof or a sequence having 90% homology thereto); b) hybridizing a second pair of PCR primers comprising a forward primer and a reverse primer operable to hybridize to at least a second target polynucleotide sequence (which may be in a non-limiting example a target nucleic acid having either one of SEQ ID NOs: 1-5 or a complement or a fragment thereof or a sequence having 90% homology thereto and being different from the first target polynucleotide sequence); c) amplifying the at least first and optionally the at least second target polynucleotide sequences; and d) detecting the at least first and optionally the at least second amplified target polynucleotide sequence products; wherein the detection of the at least first amplified target polynucleotide sequence product and optionally the detection of the at least second amplified target polynucleotide sequence product is indicative of the presence of E. coli O104:H4 in the sample. The method may also comprise hybridizing a third, a fourth and several different primers and repeating steps b) through d). Multiple amplifications and detections may be performed in parallel or simultaneously such as in a multiplex method.

[0077] In one example embodiment method for the detection of E. coli O104:H4 in a sample comprising a) hybridizing a first pair of PCR primers selected from primer sequences from a row in Table 1 comprising a forward primer (selected from SEQ ID NOs: 6-26 and/or complements thereof and/or primers having 90% sequence homology thereto) and a corresponding reverse primer (selected from the same row from SEQ ID NOs:27-47 and/or complements thereof and/or primers having 90% sequence homology thereto), to at least a first target polynucleotide sequence (also described in the same row as the first pair of primers are selected from in Table 1, described by fragment_number in the first column of the row); b) hybridizing a second pair of PCR primers selected from primer sequences in another row in Table 1 comprising a second forward primer and a second reverse primer (as described above), to at least a second target polynucleotide sequence (also described in the same row as the second pair of primers of Table 1); c) amplifying said at least first and said at least second target polynucleotide sequences; and d) detecting said at least first and said at least second amplified target polynucleotide sequence products; wherein the detection of the at least first amplified target polynucleotide sequence product and the detection of the at least second amplified target polynucleotide sequence product is indicative of the presence of E. coli O104:H4 in the sample. Optionally steps b)-d) above may be repeated with subsequent such as third, fourth . . . primer pairs.

[0078] In further embodiments, a method may further comprise detection of the first and second amplified (and subsequent such as third, fourth . . . ) products by hybridization using one or more probes. Probes that may be used are described in Table 1, where different probes specific to a particular target sequence of E. coli O104:H4 are described in SEQ ID NOs: 48-68. Primer-probe combinations outlined in a row of Table 1 may be used to amplify and detect a corresponding target nucleic acid sequence.

[0079] In other embodiments, dual or multiplex (more than 2 assay sets) assay approach can be used to detect and distinguish E. coli O104:H4 strains and serotypes from each other. Accordingly, some embodiments describe methods for specifically detecting E. coli O104:H4, comprising assays to detect the presence of multiple target genes of E. coli O104:H4 thereby detecting the presence of specific E. coli O104:H4 strains and serotypes.

[0080] In some embodiments, such a method may comprise detecting the presence of genes including a fliC_H4 gene which detects an E. coli carrying the H4 allele of the fliC gene in combination with detecting the presence of a terD gene that detects the presence of an carrying a terD tellurite resistance gene, the detection of an O104 antigen gene, an AAF-I gene and a Stx2 shiga-toxin encoding gene locus. Some embodiments describe detecting all these gene loci as positive identification of enterohemorrahagic E. coli O104:H4. Some embodiments describe detecting at least two of these gene loci as positive identification of enterohemorrahagic E. coli O104:H4. Some embodiments describe detecting two or more of these gene loci using specific primer combinations (and probes) described in Tables 2, 3 and 4 as positive identification of enterohemorrahagic E. coli O104:H4.

[0081] Some embodiments describe methods for detecting target gene sequences of enterohemorrahagic E. coli O104:H4 of the present European outbreak and distinguishing it from previous outbreak strains. Some example methods (assays) are described in Table 5.

[0082] Assay designs for detecting the presence of two or more genes to detect and identify the presence of E. coli O104:H4 are described in Tables 1-4 of this application and in Examples.

[0083] Table 2 described several examples of forward and reverse primer pairs and corresponding probe sequences that may be used to identify fliC-H4 and ter D, and O104 genes. Table 4 describes several examples of forward and reverse primer pairs and corresponding probe sequences that may be used to identify the AAF-I locus.

[0084] In some embodiments, a method of detection may further comprise preparing a sample for PCR amplification (prior to hybridizing with primers for amplification), and may comprise for example, but not limited to (1) bacterial enrichment, (2) separation of bacterial cells from the sample, (3) cell lysis, and (4) nucleic acid extraction (e.g. total DNA extraction).

[0085] In some embodiments, sample nucleic acid extraction may be bypassed and bacterial enrichment may be carried out by methods such as affinity separation, immunological separation and/or magnetic separation and PCR may be carried out on the enriched bacteria.

[0086] Compositions and methods described herein are ideally suited for the preparation of kits suitable for identifying the presence of E. coli O104:H4. Such a kit may comprise various reagents utilized in methods described above, preferably in concentrated form and/or in a lyophilized form. The reagents of this kit may comprise, but are not limited to, buffer, appropriate nucleotide triphosphates, DNA polymerases, intercalating dye, primers, probes, salt, and instructions for the use of the kit.

[0087] In one embodiment, disclosed is a kit for the detection of E. coli O104:H4 in a sample comprising: a) at least one pair of PCR primers specific to a target nucleic acid specific to an E. coli O104:H4 organism, wherein the PCR primers are operable to hybridize to and amplify under suitable conditions a target nucleic acid specific to an E. coli O104:H4 organism to form amplified target nucleic acid products; b) optionally further comprising probes specific to hybridize to and detect an amplified target nucleic acid product specific to an E. coli O104:H4 organism; and c) one or more components selected from at least one enzyme, dNTPs, at least one buffer, at least one salt, at least one control nucleic acid sample and an instruction protocol.

[0088] In some embodiments, kit primers may be labeled. A kit comprising multiple pairs of primers may have primer pairs each labeled with different labels that may be detectable separately. Probes comprised in kits of the disclosure may be labeled. If a kit comprises multiple probes each probe may be labeled with a different label to allow detection of different products that may be the target of each different probe.

[0089] In one example embodiment, primers of a kit may be sequences selected from a row in Tables 1 comprising a forward primer and a corresponding reverse primer (SEQ ID NO: 6-47) or fragments or complements or sequences having 90% homology thereto that are operable to hybridize to and amplify at least a first target polynucleotide sequence (also described in the same row as the first pair of primers of Table 1). If multiple primers (and probes) are comprised in a kit, a first PCR primer (and probe) is selected from any row of Table 1 and a subsequent (second, third . . . ) pair of PCR primers selected from another row in Table 1. In some embodiments, probes may be selected from SEQ ID NOs: 48-68. Primers and probes may be labeled and/or modified. A first probe may further comprise a first label and a second (or subsequent) probe further comprise a second (or subsequent) label. Kits may comprise more than one sets of primers and/or probes shown in Table 1. Kits in some embodiments may comprise all the primer and probes shown in Table 1.

[0090] In another example embodiment, disclosed is a kit for the detection of E. coli O104:H4 in a sample comprising a) at least one pair of PCR primers selected from sequences selected from a row in the Tables 2, 3 and/or 4 described as forward primers and reverse primers such as SEQ ID NOS:69-82, and/or SEQ ID NOS:105-107 and/or SEQ ID NOS: 90-99, respectively, fragments and/or complements and/or sequences having 90% homology thereto, that are specific to bind to, hybridize and amplify at least one target polynucleotide sequence to form an amplified target nucleic acid sequence; and b) a optionally at least one probe specific to hybridize to and detect an amplified target nucleic acid product described in step a); and c) one or more components selected from at least one enzyme, dNTPs, at least one buffer, at least one salt, at least one control nucleic acid sample and an instruction protocol. Kits may comprise more than one sets of primers and/or probes shown in Tables 2, 3 and 4. Kits in some embodiments may comprise all the primer and probes shown in Tables 2, 3 and 4.

[0091] Another example kit for the detection of E. coli O104:H4 may comprise: at least two PCR primer pairs operable to amplify at least two target genes of E. coli O104:H4, each PCR primers pair comprising at least one forward primer and at least one reverse primer; wherein the primers are selected from: at least one pair of primers operable to amplify a shiga-toxin encoding locus Stx2; and/or at least one primer pair operable to amplify an O104 antigen encoding locus; and/or at least one primer pair operable to amplify a fliC_H4 locus encoding a H4 allele of a fliC gene; and/or at least one primer pair operable to amplify a tellurite resistance gene terD; and/or at least one primer pair operable to amplify a locus encoding aggregative fimbriae AAF-I. The kit may additionally comprise at least two probes operable to bind to amplified products of at least two target genes of E. coli O104:H4 and in the example above may be selected from: at least one probe operable to hybridize to and detect an amplified product of a shiga-toxin encoding locus Stx2; and/or at least one probe operable to hybridize to and detect an amplified product of a O104 antigen encoding locus; and/or at least one probe operable to hybridize to and detect an amplified product of a fliC_H4 locus encoding a H4 allele of a fliC gene; and/or at least one probe operable to hybridize to and detect an amplified product of a tellurite resistance gene terD; and/or at least one probe operable to hybridize to and detect an amplified product of a locus encoding aggregative fimbriae AAF-I.

[0092] A kit of the disclosure may further comprise one or more components such as but not limited to: at least one enzyme, dNTPs, at least one buffer, at least one salt, at least one control nucleic acid sample, loading solution for preparation of the amplified material for electrophoresis, genomic DNA as a template control, a size marker to insure that materials migrate as anticipated in a separation medium, and an instruction protocol and manual to educate a user and limit error in use. It is within the scope of these teachings to provide test kits for use in manual applications or test kits for use with automated sample preparation, reaction set-up, detectors or analyzers. In some embodiments, a kit amplification product may be further analyzed by methods such as but not limited to electrophoresis, hybridization, mass spectrometry, nanostring, microfluidics, chemiluminescence and/or enzyme technologies.

[0093] Components of kits may be individually and in various combinations comprised in one or a plurality of suitable container means.

[0094] For the purposes of interpreting of this specification, the following definitions may apply and whenever appropriate, terms used in the singular will also include the plural and vice versa. In the event that any definition set forth below conflicts with the usage of that word in any other document, including any document incorporated herein by reference, the definition set forth below shall always control for purposes of interpreting this specification and its associated claims unless a contrary meaning is clearly intended (for example in the document where the term is originally used). It is noted that, as used in this specification and the appended claims, the singular forms “a,” “an,” and “the,” include plural referents unless expressly and unequivocally limited to one referent. The use of “or” means “and/or” unless stated otherwise. The use of “comprise,” “comprises,” “comprising,” “have” “having” “include,” “includes,” and “including” are interchangeable and not intended to be limiting. Furthermore, where the description of one or more embodiments uses the term “comprising,” those skilled in the art would understand that, in some specific instances, the embodiment or embodiments can be alternatively described using the language “consisting essentially of” and/or “consisting of.”

[0095] As used herein, the phrase “nucleic acid,” “nucleic acid sequence” “oligonucleotide”, and polynucleotide(s)” are interchangeable and not intended to be limiting.

[0096] As used herein, the phrase “stringent hybridization conditions” refers to hybridization conditions which can take place under a number of pH, salt and temperature conditions. The pH can vary from 6 to 9, preferably 6.8 to 8.5. The salt concentration can vary from 0.15 M sodium to 0.9 M sodium, and other cations can be used as long as the ionic strength is equivalent to that specified for sodium. The temperature of the hybridization reaction can vary from 30° C. to 80° C., preferably from 45° C. to 70° C. Additionally, other compounds can be added to a hybridization reaction to promote specific hybridization at lower temperatures, such as at or approaching room temperature. Among the compounds contemplated for lowering the temperature requirements is formamide. Thus, a polynucleotide is typically “substantially complementary” to a second polynucleotide if hybridization occurs between the polynucleotide and the second polynucleotide. As used herein, “specific hybridization” or “hybridize” or “hybridization” refers to hybridization between two polynucleotides under stringent hybridization conditions.

[0097] As used herein, the term “polynucleotide” refers to a polymeric form of nucleotides of any length, either ribonucleotides, deoxynucleotides, or peptide nucleic acids (PNA), and includes both double- and single-stranded RNA, DNA, and PNA. A polynucleotide may include nucleotide sequences having different functions, including, for instance, coding regions, and non-coding regions such as regulatory regions. A polynucleotide can be obtained directly from a natural source, or can be prepared with the aid of recombinant, enzymatic, or chemical techniques. A polynucleotide can be linear or circular in topology. A polynucleotide can be, for example, a portion of a vector, such as an expression or cloning vector, or a fragment. An “oligonucleotide” refers to a polynucleotide of the present invention, typically a primer and/or a probe.

[0098] As used herein a “target-specific polynucleotide” or a “target nucleic acid” refers to a polynucleotide having a target-binding segment that is perfectly or substantially complementary to a target sequence, such that the polynucleotide binds specifically to an intended target without significant binding to non-target sequences under sufficiently stringent hybridization conditions. The target-specific polynucleotide can be e.g., a primer or probe and the subject of hybridization with its complementary target sequence.

[0099] The term “target sequence”, “target signature sequence” “target nucleic acid”, “target” or “target polynucleotide sequence” refers to a nucleic acid of interest. The target sequence can be a polynucleotide sequence that is the subject of hybridization with a complementary polynucleotide, e.g. a primer or probe. The target sequence can be composed of DNA, RNA, an analog thereof, and including combinations thereof. The target sequence may be known or not known, in terms of its actual sequence and its amplification can be desired. The target sequence may or may not be of biological significance. As non-limiting examples, target sequences may include regions of genomic DNA, regions of genomic DNA which are believed to contain one or more polymorphic sites, DNA encoding or believed to encode genes or portions of genes of known or unknown function, DNA encoding or believed to encode proteins or portions of proteins of known or unknown function, DNA encoding or believed to encode regulatory regions such as promoter sequences, splicing signals, polyadenylation signals, etc.

[0100] As used herein an “amplified target polynucleotide sequence product” or “amplified product” refers to the resulting amplicon from an amplification reaction such as a polymerase chain reaction. The resulting amplicon product arises from hybridization of complementary primers to a target polynucleotide sequence under suitable hybridization conditions and the repeating in a cyclic manner the polymerase chain reaction as catalyzed by DNA polymerase for DNA amplification or RNA polymerase for RNA amplification.

[0101] As used herein, the “polymerase chain reaction” or PCR is a an amplification of nucleic acid consisting of an initial denaturation step which separates the strands of a double stranded nucleic acid sample, followed by repetition of (i) an annealing step, which allows amplification primers to anneal specifically to positions flanking a target sequence; (ii) an extension step which extends the primers in a 5′ to 3′ direction thereby forming an amplicon polynucleotide complementary to the target sequence, and (iii) a denaturation step which causes the separation of the amplicon from the target sequence (Mullis et al., Eds, The Polymerase Chain Reaction, BirkHauser, Boston, Mass. (1994). Each of the above steps may be conducted at a different temperature, preferably using an automated thermocycler (Applied Biosystems LLC, a division of Life Technologies Corporation, Foster City, Calif.). If desired, RNA samples can be converted to DNA/RNA heteroduplexes or to duplex cDNA by methods known to one of skill in the art.

[0102] As used herein, “amplifying” and “amplification” refers to a broad range of techniques for increasing polynucleotide sequences, either linearly or exponentially. Exemplary amplification techniques include, but are not limited to, PCR or any other method employing a primer extension step. Other nonlimiting examples of amplification include, but are not limited to, ligase detection reaction (LDR) and ligase chain reaction (LCR). Amplification methods may comprise thermal-cycling or may be performed isothermally. In various embodiments, the term “amplification product” includes products from any number of cycles of amplification reactions.

[0103] In certain embodiments, amplification methods comprise at least one cycle of amplification, for example, but not limited to, the sequential procedures of: hybridizing primers to primer-specific portions of target sequence or amplification products from any number of cycles of an amplification reaction; synthesizing a strand of nucleotides in a template-dependent manner using a polymerase; and denaturing the newly-formed nucleic acid duplex to separate the strands. The cycle may or may not be repeated.

[0104] Descriptions of certain amplification techniques can be found, among other places, in H. Ehrlich et al., Science, 252:1643-50 (1991), M. Innis et al., PCR Protocols: A Guide to Methods and Applications, Academic Press, New York, N.Y. (1990), R. Favis et al., Nature Biotechnology 18:561-64 (2000), and H. F. Rabenau et al., Infection 28:97-102 (2000); Sambrook and Russell, Molecular Cloning, Third Edition, Cold Spring Harbor Press (2000) (hereinafter “Sambrook and Russell”), Ausubel et al., Current Protocols in Molecular Biology (1993) including supplements through September 2005, John Wiley & Sons (hereinafter “Ausubel et al.”).

[0105] The term “label” refers to any moiety which can be attached to a molecule and: (i) provides a detectable signal; (ii) interacts with a second label to modify the detectable signal provided by the second label, e.g. FRET; (iii) stabilizes hybridization, i.e. duplex formation; or (iv) provides a capture moiety, i.e. affinity, antibody/antigen, ionic complexation. Labelling can be accomplished using any one of a large number of known techniques employing known labels, linkages, linking groups, reagents, reaction conditions, and analysis and purification methods. Labels include light-emitting compounds which generate a detectable signal by fluorescence, chemiluminescence, or bioluminescence (Kricka, L. in Nonisotopic DNA Probe Techniques (1992), Academic Press, San Diego, pp. 3-28). Another class of labels are hybridization-stabilizing moieties which serve to enhance, stabilize, or influence hybridization of duplexes, e.g. intercalators, minor-groove binders, and cross-linking functional groups (Blackburn, G. and Gait, M. Eds. “DNA and RNA structure” in Nucleic Acids in Chemistry and Biology, 2.sup.nd Edition, (1996) Oxford University Press, pp. 15-81). Yet another class of labels effect the separation or immobilization of a molecule by specific or non-specific capture, for example biotin, digoxigenin, and other haptens (Andrus, A. “Chemical methods for 5′ non-isotopic labelling of PCR probes and primers” (1995) in PCR 2: A Practical Approach, Oxford University Press, Oxford, pp. 39-54).

[0106] The terms “annealing” and “hybridization” are used interchangeably and mean the base-pairing interaction of one nucleic acid with another nucleic acid that results in formation of a duplex or other higher-ordered structure. The primary interaction is base specific, i.e. A/T and G/C, by Watson/Crick and Hoogsteen-type hydrogen bonding.

[0107] The term “end-point analysis” refers to a method where data collection occurs only when a reaction is substantially complete.

[0108] The term “real-time analysis” refers to periodic monitoring during PCR. Certain systems such as the ABI 7700 Sequence Detection System (Applied Biosystems, Foster City, Calif.) conduct monitoring during each thermal cycle at a pre-determined or user-defined point. Real-time analysis of PCR with FRET probes measures fluorescent dye signal changes from cycle-to-cycle, preferably minus any internal control signals.

[0109] The term “quenching” refers to a decrease in fluorescence of a first moiety (reporter dye) caused by a second moiety (quencher) regardless of the mechanism.

[0110] A “primer,” as used herein, is an oligonucleotide that is complementary to a portion of target polynucleotide and, after hybridization to the target polynucleotide, may serve as a starting-point for an amplification reaction and the synthesis of an amplification product. Primers include, but are not limited to, spanning primers. A “primer pair” refers to two primers that can be used together for an amplification reaction. A “PCR primer” refers to a primer in a set of at least two primers that are capable of exponentially amplifying a target nucleic acid sequence in the polymerase chain reaction.

[0111] The term “probe” comprises a polynucleotide that comprises a specific portion designed to hybridize in a sequence-specific manner with a complementary region of a specific nucleic acid sequence, e.g., a target nucleic acid sequence. In certain embodiments, the specific portion of the probe may be specific for a particular sequence, or alternatively, may be degenerate, e.g., specific for a set of sequences. In certain embodiments, the probe is labeled. The probe can be an oligonucleotide that is complementary to at least a portion of an amplification product formed using two primers.

[0112] The term “modified” primer or probe may be used to describe a primer or probe modified as described for example in U.S. Pat. Nos. 7,408,051; 7,414,118; 7,585,649; 7,807,376; and U.S. patent application Ser. No. 12/889,273 (Attorney Docket No. 5099 Family); and U.S. Pat. Nos. 7,517,978; 7,943,752; and U.S. patent application Ser. No. 13/052,382 (Attorney Docket No. 5257 Family); and U.S. Pat. No. 7,408,051 and EP Patent No. 1902142B1, (Attorney Docket No. 5354 Family), the entire contents of which are incorporated herein by reference.

[0113] The terms “complement” and “complementary” as used herein, refer to the ability of two single stranded polynucleotides (for instance, a primer and a target polynucleotide) to base pair with each other, where an adenine on one strand of a polynucleotide will base pair to a thymine or uracil on a strand of a second polynucleotide and a cytosine on one strand of a polynucleotide will base pair to a guanine on a strand of a second polynucleotide. Two polynucleotides are complementary to each other when a nucleotide sequence in one polynucleotide can base pair with a nucleotide sequence in a second polynucleotide. For instance, 5′-ATGC and 5′-GCAT are complementary.

[0114] A “label” refers to a moiety attached (covalently or non-covalently), or capable of being attached, to an oligonucleotide, which provides or is capable of providing information about the oligonucleotide (e.g., descriptive or identifying information about the oligonucleotide) or another polynucleotide with which the labeled oligonucleotide interacts (e.g., hybridizes). Labels can be used to provide a detectable (and optionally quantifiable) signal. Labels can also be used to attach an oligonucleotide to a surface.

[0115] A “fluorophore” is a moiety that can emit light of a particular wavelength following absorbance of light of shorter wavelength. The wavelength of the light emitted by a particular fluorophore is characteristic of that fluorophore. Thus, a particular fluorophore can be detected by detecting light of an appropriate wavelength following excitation of the fluorophore with light of shorter wavelength.

[0116] The term “quencher” as used herein refers to a moiety that absorbs energy emitted from a fluorophore, or otherwise interferes with the ability of the fluorescent dye to emit light. A quencher can re-emit the energy absorbed from a fluorophore in a signal characteristic for that quencher, and thus a quencher can also act as a fluorophore (a fluorescent quencher). This phenomenon is generally known as fluorescent resonance energy transfer (FRET). Alternatively, a quencher can dissipate the energy absorbed from a fluorophore as heat (a non-fluorescent quencher).

[0117] As used herein the term “sample” refers to a starting material suspected of harboring a particular microorganism or group of microorganisms. A “contaminated sample” refers to a sample harboring a pathogenic microbe thereby comprising nucleic acid material from the pathogenic microbe. Examples of samples include, but are not limited to, food samples (including but not limited to samples from food intended for human or animal consumption such as processed foods, raw food material, produce (e.g., fruit and vegetables), legumes, meats (from livestock animals and/or game animals), fish, sea food, nuts, beverages, drinks, fermentation broths, and/or a selectively enriched food matrix comprising any of the above listed foods), water samples, environmental samples (e.g., soil samples, dirt samples, garbage samples, sewage samples, industrial effluent samples, air samples, or water samples from a variety of water bodies such as lakes, rivers, ponds etc.,), air samples (from the environment or from a room or a building), forensic samples, agricultural samples, pharmaceutical samples, biopharmaceutical samples, samples from food processing and manufacturing surfaces, and/or biological samples. A “biological sample” refers to a sample obtained from eukaryotic or prokaryotic sources. Examples of eukaryotic sources include mammals, such as a human, a cow, a pig, a chicken, a turkey, a livestock animal, a fish, a crab, a crustacean, a rabbit, a game animal, and/or a member of the family Muridae (a murine animal such as rat or mouse). A biological sample may include blood, urine, feces, or other materials from a human or a livestock animal. A biological sample can be, for instance, in the form of a single cell, in the form of a tissue, or in the form of a fluid.

[0118] A sample may be tested directly, or may be prepared or processed in some manner prior to testing. For example, a sample may be processed to enrich any contaminating microbe and may be further processed to separate and/or lyse microbial cells contained therein. Lysed microbial cells from a sample may be additionally processed or prepares to separate, isolate and/or extract genetic material from the microbe for analysis to detect and/or identify the contaminating microbe. Analysis of a sample may include one or more molecular methods. For example, according to some exemplary embodiments of the present disclosure, a sample may be subject to nucleic acid amplification (for example by PCR) using appropriate oligonucleotide primers that are specific to one or more microbe nucleic acid sequences that the sample is suspected of being contaminated with. Amplification products may then be further subject to testing with specific probes (or reporter probes) to allow detection of microbial nucleic acid sequences that have been amplified from the sample. In some embodiments, if a microbial nucleic acid sequence is amplified from a sample, further analysis may be performed on the amplification product to further identify, quantify and analyze the detected microbe (determine parameters such as but not limited to the microbial strain, pathogenicity, quantity etc.).

[0119] As used herein “preparing” or “preparing a sample” or “processing” or processing a sample” refers to one or more of the following steps to achieve extraction and separation of a nucleic acid from a sample: (1) bacterial enrichment, (2) separation of bacterial cells from the sample, (3) cell lysis, and (4) nucleic acid extraction and/or purification (e.g., DNA extraction, total DNA extraction, genomic DNA extraction, RNA extraction). Embodiments of the nucleic acid extracted include, but are not limited to, DNA, RNA, mRNA and miRNA. Alternatively, nucleic acid extraction and purification may be bypassed.

[0120] As used herein, “presence” refers to the existence (and therefore to the detection) of a reaction, a product of a method or a process (including but not limited to, an amplification product resulting from an amplification reaction), or to the “presence” and “detection” of an organism such as a pathogenic organism or a particular strain or species of an organism.

[0121] As used herein, “detecting” or “detection” refers to the disclosure or revelation of the presence or absence in a sample of a target polynucleotide sequence or amplified target polynucleotide sequence product. The detecting can be by end point, real-time, enzymatic, and by resolving the amplification product on a gel and determining whether the expected amplification product is present, or other methods known to one of skill in the art.

[0122] The presence or absence of an amplified product can be determined or its amount measured. Detecting an amplified product can be conducted by standard methods well known in the art and used routinely. The detecting may occur, for instance, after multiple amplification cycles have been run (typically referred to an end-point analysis), or during each amplification cycle (typically referred to as real-time). Detecting an amplification product after multiple amplification cycles have been run is easily accomplished by, for instance, resolving the amplification product on a gel and determining whether the expected amplification product is present. In order to facilitate real-time detection or quantification of the amplification products, one or more of the primers and/or probes used in the amplification reaction can be labeled, and various formats are available for generating a detectable signal that indicates an amplification product is present. For example, a convenient label is typically a label that is fluorescent, which may be used in various formats including, but are not limited to, the use of donor fluorophore labels, acceptor fluorophore labels, fluorophores, quenchers, and combinations thereof. Assays using these various formats may include the use of one or more primers that are labeled (for instance, scorpions primers, amplifluor primers), one or more probes that are labeled (for instance, adjacent probes, TaqMan® probes, light-up probes, molecular beacons), or a combination thereof. The skilled person will understand that in addition to these known formats, new types of formats are routinely disclosed. The present invention is not limited by the type of method or the types of probes and/or primers used to detect an amplified product. Using appropriate labels (for example, different fluorophores) it is possible to combine (multiplex) the results of several different primer pairs (and, optionally, probes if they are present) in a single reaction. As an alternative to detection using a labeled primer and/or probe, an amplification product can be detected using a polynucleotide binding dye such as a fluorescent DNA binding dye. Examples include, for instance, SYBR® Green dye or SYBR® Gold dye (Molecular Probes). Upon interaction with the double-stranded amplification product, such polynucleotide binding dyes emit a fluorescence signal after excitation with light at a suitable wavelength. A polynucleotide binding dye such as a polynucleotide intercalating dye also can be used.

[0123] The nucleic acid sequences described in SEQ ID NO: 108-471 are from a E. coli O104:H4 bacteria isolated from the European 2011 outbreak of an enterohemorrhagic strain of E. coli.

[0124] As used herein, an “E. coli O104:H4-specific nucleotide probe” refers to a sequence that is able to specifically hybridize to an E. coli O104:H4 target sequence present in a sample containing E. coli O104:H4 under suitable hybridization conditions and which does not hybridize with DNA from other E. coli strains or from other bacterial species. It is well within the ability of one skilled in the art to determine suitable hybridization conditions based on probe length, G+C content, and the degree of stringency required for a particular application.

[0125] It is expected that minor sequence variations in E. coli O104:H4-specific nucleotide sequences associated with nucleotide additions, deletions and mutations, whether naturally occurring or introduced in vitro, would not interfere with the usefulness of SEQ ID NO:1-5 and the various primer and probe nucleic acid sequences (SEQ ID NOS: 6-107) disclosed herein in the detection of enterohemorrhagic E. coli (EHEC), in methods for preventing EHEC infection, and in methods for treating EHEC infection, as would be understood by one of skill in the art. Therefore, the scope of the present invention as claimed is intended to encompass minor variations in the sequences of described here and sequences having at least 90% homology to the SEQ ID NO: 1-5 and the primer and probe sequences of SEQ ID NOS: 6-107 listed in Tables 1-4 in the Examples.

[0126] The probe may be RNA or DNA. Depending on the detection means employed, the probe may be unlabeled, radiolabeled, chemiluminescent labeled, enzyme labeled, or labeled with a dye. The probe may be hybridized with a sample in solution or immobilized on a solid support such as nitrocellulose, a microarray or a nylon membrane, or the probe may be immobilized on a solid support, such as a silicon chip or a microarray.

[0127] Conditions that “allow” an event to occur or conditions that are “suitable” for an event to occur, such as hybridization, strand extension, and the like, or “suitable” conditions are conditions that do not prevent such events from occurring. Thus, these conditions permit, enhance, facilitate, and/or are conducive to the event. Such conditions, known in the art and described herein, may depend upon, for example, the nature of the nucleotide sequence, temperature, and buffer conditions. These conditions may also depend on what event is desired, such as hybridization, cleavage, or strand extension. An “isolated” polynucleotide refers to a polynucleotide that has been removed from its natural environment. A “purified” polynucleotide is one that is at least about 60% free, preferably at least about 75% free, and most preferably at least about 90% free from other components with which they are naturally associated.

[0128] The words “preferred” and “preferably” refer to embodiments of the invention that may afford certain benefits, under certain circumstances. However, other embodiments may also be preferred, under the same or other circumstances. Furthermore, the recitation of one or more preferred embodiments does not imply that other embodiments are not useful, and is not intended to exclude other embodiments from the scope of the invention.

[0129] The terms “comprises” and variations thereof do not have a limiting meaning where these terms appear in the description and claims. Unless otherwise specified, “a,” “an,” “the,” and “at least one” are used interchangeably and mean one or more than one.

[0130] Also herein, the recitations of numerical ranges by endpoints include all numbers subsumed within that range (e.g., 1 to 5 includes 1, 1.5, 2, 2.75, 3, 3.80, 4, 5, etc.). The term “and/or” means one or all of the listed elements or a combination of any two or more of the listed elements.

[0131] There are many known methods of amplifying nucleic acid sequences including e.g., PCR. See, e.g., PCR Technology: Principles and Applications for DNA Amplification (ed. H. A. Erlich, Freeman Press, NY, N.Y., 1992); PCR Protocols: A Guide to Methods and Applications (eds. Innis, et al., Academic Press, San Diego, Calif., 1990); Mattila et al., Nucleic Acids Res. 19, 4967 (1991); Eckert et al., PCR Methods and Applications 1, 17 (1991); PCR (eds. McPherson et al., IRL Press, Oxford); and U.S. Pat. Nos. 4,683,202, 4,683,195, 4,800,159 4,965,188 and 5,333,675 each of which is incorporated herein by reference in their entireties for all purposes.

[0132] Nucleic acid amplification techniques are traditionally classified according to the temperature requirements of the amplification process. Isothermal amplifications are conducted at a constant temperature, in contrast to amplifications that require cycling between high and low temperatures. Examples of isothermal amplification techniques are: Strand Displacement Amplification (SDA; Walker et al., 1992, Proc. Natl. Acad. Sci. USA 89:392 396; Walker et al., 1992, Nuc. Acids. Res. 20:1691 1696; and EP 0 497 272, all of which are incorporated herein by reference), self-sustained sequence replication (3SR; Guatelli et al., 1990, Proc. Natl. Acad. Sci. USA 87:1874 1878), the Qβ replicase system (Lizardi et al., 1988, BioTechnology 6:1197 1202), and the techniques disclosed in WO 90/10064 and WO 91/03573.

[0133] Examples of techniques that require temperature cycling are: polymerase chain reaction (PCR; Saiki et al., 1985, Science 230:1350 1354), ligase chain reaction (LCR; Wu et al., 1989, Genomics 4:560 569; Barringer et al., 1990, Gene 89:117 122; Barany, 1991, Proc. Natl. Acad. Sci. USA 88:189 193), transcription-based amplification (Kwoh et al., 1989, Proc. Natl. Acad. Sci. USA 86:1173 1177) and restriction amplification (U.S. Pat. No. 5,102,784).

[0134] Other exemplary techniques include Nucleic Acid Sequence-Based Amplification (“NASBA”; see U.S. Pat. No. 5,130,238), Q.beta. replicase system (see Lizardi et al., BioTechnology 6:1197 (1988)), and Rolling Circle Amplification (see Lizardi et al., Nat Genet 19:225 232 (1998)). The amplification primers of the present invention may be used to carry out, for example, but not limited to, PCR, SDA or tSDA. Any of the amplification techniques and methods disclosed herein can be used to practice the claimed invention as would be understood by one of ordinary skill in the art.

[0135] PCR is an extremely powerful technique for amplifying specific polynucleotide sequences, including genomic DNA, single-stranded cDNA, and mRNA among others. Various methods of conducting PCR amplification and primer design and construction for PCR amplification will be known to those of skill in the art. Generally, in PCR a double-stranded DNA to be amplified is denatured by heating the sample. New DNA synthesis is then primed by hybridizing primers to the target sequence in the presence of DNA polymerase and excess dNTPs. In subsequent cycles, the primers hybridize to the newly synthesized DNA to produce discreet products with the primer sequences at either end. The products accumulate exponentially with each successive round of amplification.

[0136] The DNA polymerase used in PCR is often a thermostable polymerase. This allows the enzyme to continue functioning after repeated cycles of heating necessary to denature the double-stranded DNA. Polymerases that are useful for PCR include, for example, Taq DNA polymerase, Tth DNA polymerase, Tfl DNA polymerase, Tma DNA polymerase, Tli DNA polymerase, and Pfu DNA polymerase. There are many commercially available modified forms of these enzymes including: AmpliTaq® and AmpliTaq Gold® both available from Applied Biosystems. Many are available with or without a 3- to 5′ proofreading exonuclease activity. See, for example, Vent® and Vent®. (exo-) available from New England Biolabs.

[0137] Other suitable amplification methods include the ligase chain reaction (LCR) (e.g., Wu and Wallace, Genomics 4, 560 (1989) and Landegren et al., Science 241, 1077 (1988)), transcription amplification (Kwoh et al., Proc. Natl. Acad. Sci. USA 86, 1173 (1989)), and self-sustained sequence replication (Guatelli et al., Proc. Nat. Acad. Sci. USA, 87, 1874 (1990)) and nucleic acid based sequence amplification (NABSA). (See, U.S. Pat. Nos. 5,409,818, 5,554,517, and 6,063,603). The latter two amplification methods include isothermal reactions based on isothermal transcription, which produce both single-stranded RNA (ssRNA) and double-stranded DNA (dsDNA) as the amplification products in a ratio of about 30 or 100 to 1, respectively.

[0138] Detection of E. coli O104:H4 by the use of the polymerase chain reaction provides a rapid method for detection. Moreover, the primer(s) (and probe used in a real-time PCR reaction) is desired to be specific and sensitive for only the organism of interest, i.e., E. coli O104:H4. However, the genome of E. coli O104:H4 is very similar to other E. coli genomes, both those which are disease causing (i.e., infectious) and pathogenic (ability to cause damage) e.g., serotype O104:H21 and others which may not be pathogenic. Therefore, in one embodiment, the identification and selection of genomic sequence from E. coli O104:H4 (e.g., SEQ ID NOs: 108-471, GenBank Accession No. ______) for the design of real-time PCR assays is based on the differential identification of E. coli O104:H4 genomic sequence (I, inclusion set) not found in closely related strains of E. coli (E, exclusion set). By identifying sequences not found in both infections and non-infectious strains of E. coli, target sequences specific to E. coli O104:H4 have been identified for primer design that do not, or only with rare exception, detect closely related E. coli strains and therefore identify E. coli O104:H4 with specificity and sensitivity.

[0139] The above description of the present invention is not intended to describe each disclosed embodiment or every implementation of the present invention. The description that follows more particularly exemplifies illustrative embodiments. In several places throughout the application, guidance is provided through lists of examples, which examples can be used in various combinations. In each instance, the recited list serves only as a representative group and should not be interpreted as an exclusive list.

[0140] Those having ordinary skill in the art will understand that many modifications, alternatives, and equivalents are possible. All such modifications, alternatives, and equivalents are intended to be encompassed herein.

### EXAMPLES

[0141] The following procedures are representative examples of methods according to the disclosure that may be employed for the detection of E. coli O104:H4.

### Example 1

### Methods to Detect E Coli O104:H4 Using Target Signature Sequences

[0142] The present example describes assays designed to detect target signature sequences in E. coli O104:H4 using example probe and/or primer sequences designed by the present inventors. Primer sequences comprising pairs of forward and reverse primers and corresponding probe sequences are shown in Table 1 below.

[0143] An exemplary method of detecting the presence of E. coli O104:H4 in a sample, may comprise: isolating nucleic acid from a sample suspected of containing an E. coli O104:H4 and detecting the presence of at least one target signature sequences as shown in Table 1 below (shown in the first column). Each target signature sequence is shown in Table 1 by a fragment number and hit coordinate number corresponding to a nucleic acid sequence found in the genome of E. coli O104:H4 described in SEQ ID NOs: 108-471 and a BacTrack Assay Number in Table 1 describes an example of an associated primer pair (having a forward primer and a reverse primer) and a corresponding probe that may be used for amplification and detection of that target signature sequence. As shown in Table 1 a forward and reverse primer pair is shown in a row and if used in an amplification reaction will amplify the corresponding target signature sequence nucleic acid, for example BacTrack Assay number 61332 maybe used to detect the presence of E. coli O104:H4 in a sample suspected of being contaminated by detecting the presence of a target signature nucleic acid sequence corresponding to “fragment_{—}4942651-4942996” with hit coordinates “113 . . . 141 . . . 195” using a forward primer having the nucleic acid sequence ACTTCGAAATTTGCTGGCATGTG (SEQ ID NO: 6) and a reverse primer having the nucleic acid sequence TCATCTCCGCCAGGCATTTT (SEQ ID NO: 27) to amplify the target signature nucleic acid sequence, which may in some embodiments be detected using a probe having the nucleic acid sequence ATGTTGCCATTTGTTTGATTG (SEQ ID NO: 48).

TABLE 1

| Target Signature | Hit | BacTrack | | | |
|---|---|---|---|---|---|
| Sequence | coordinates | Assay ID | Forward Primer | Reverse Primer | Probe |
| fragment_4942651- | 113 . . . 141 . . . 195 | 61332 | ACTTCGAAATTTGCTGG | TCATCTCCGCCAGGC | ATGTTGCCATTTGTT |
| 4942996 | | | CATGTG | ATTTT | TGATTG |
| | | | [SEQ ID NO: 6] | [SEQ ID NO: 27] | [SEQ ID NO: 48] |
| fragment_4942651- | 218 . . . 243 . . . 282 | 61334 | ACAGAGCAAGCAAGACT | GAAATTGACTTCTGG | ATCCACAGGAATTTC |
| 4942996 | | | AGGAATG | CATGCTTCA | [SEQ ID NO: 49] |
| | | | [SEQ ID NO: 7] | [SEQ ID NO: 28] | |
| fragment_4942651- | 55 . . . 90 . . . 135 | 61340 | TTTCGCCAAACCAAAAT | CACATGCCAGCAAAT | AAGGCCTGCAAGAAC |
| 4942996 | | | CAGATAATGG | TTCGAAGTTA | T |
| | | | [SEQ ID NO: 8] | [SEQ ID NO: 29] | [SEQ ID NO: 50] |
| fragment_4942651- | 1 . . . 38 . . . 97 | 61342 | GTGAAAAATGAAACGTA | CAGGCCTTTAAGATC | TTCTTCTCTACAATA |
| 4942996 | | | TCGCTATTTTGT | GCCATTATC | GTTTTCG |
| | | | [SEQ ID NO: 9] | [SEQ ID NO: 30] | [SEQ ID NO: 51] |
| fragment_4942651- | 173 . . . 194 . . . 241 | 61347 | ACAAAAATGCCTGGCGG | CATTCCTAGTCTTGC | AAACGCTGTAAGAAC |
| 4942996 | | | AGAT | TTGCTCTGT | TC |
| | | | [SEQ ID NO: 10] | [SEQ ID NO: 31] | [SEQ ID NO: 52] |
| fragment_5101462- | 15 . . . 46 . . . 120 | 61330 | TCGAACAAGTTTCCTTT | TGCATGAGAATCATG | TAGTGTGTTTATTTT |
| 5102841 | | | AATGCAACAA | TAGTTACATTTTGGT | GAAAAAATAA |
| | | | [SEQ ID NO: 11] | [SEQ ID NO: 32] | [SEQ ID NO: 53] |
| fragment_5101462- | 48 . . . 93 . . . 140 | 61331 | ATTTTTTCAAAATAAAC | TGCTTTATCACTACA | CAAAATGTAACTACA |
| 5102841 | | | ACACTATTTAATAGCTT | CGTCTTGCAT | TGATTCTC |
| | | | GCTAAT | [SEQ ID NO: 33] | [SEQ ID NO: 54] |
| | | | [SEQ ID NO: 12] | | |
| fragment_5101462- | 207 . . . 245 . . . 295 | 61336 | ACACGATCAATAATCAC | GTTGCACAGTCGATA | TTAGCCATTTTCATT |
| 5102841 | | | TACACTCAAATCA | CCCTAATGTA | TTCC |
| | | | [SEQ ID NO: 13] | [SEQ ID NO: 34] | [SEQ ID NO: 55] |
| fragment_5101462- | 151 . . . 189 . . . 246 | 61341 | CCACACTAAAAACCTTC | CCTTCTGTGTTGATT | CCTTTACACACCTAA |
| 5102841 | | | GAATTTCGT | TGAGTGTAGTGA | TCAAC |
| | | | [SEQ ID NO: 14] | [SEQ ID NO: 35] | [SEQ ID NO: 56] |
| fragment_5101462- | 117 . . . 141 . . . 199 | 61345 | TGCAAGACGTGTAGTGA | GTGTGTAAAGGACTT | TTTAGTGTGGTGATT |
| 5102841 | | | TAAAGCA | TTTTCACTACGAA | TAGCC |
| | | | [SEQ ID NO: 15] | [SEQ ID NO: 36] | [SEQ ID NO: 57] |
| fragment_5131553- | 122 . . . 142 . . . 188 | 61333 | CGCGAAGCAGCAAAACT | GTTGCGCCAGCATAC | TCCCGCCAACTATACG |
| 5131745 | | | TGA | TTCTG | [SEQ ID NO: 58] |
| | | | [SEQ ID NO: 16] | [SEQ ID NO: 37] | |
| fragment_5131553- | 23 . . . 46 . . . 87 | 61338 | CCCGTCATGAGAGAACT | CGAGTTTCGTAGGCC | ACAGCTTTCCATAGTA |
| 5131745 | | | GAACT | AGATCAA | ATCA |
| | | | [SEQ ID NO: 17] | [SEQ ID NO: 38] | [SEQ ID NO: 59] |
| fragment_5131553- | 61 . . . 95 . . . 129 | 61348 | GCTGTTTGATCTGGCCT | GCTTCGCGGAGCAAT | ACCAACCGGACTCGCG |
| 5131745 | | | ACGAAA | GTG | [SEQ ID NO: 60] |
| | | | [SEQ ID NO: 18] | [SEQ ID NO: 39] | |
| fragment_5298507- | 58 . . . 94 . . . 152 | 61329 | GCGAGGGATGCGCATAA | ACCCTCACGAGTTAA | CAGTGGCTAAAGATAT |
| 5299488 | | | AA | GTTGTTTTGT | TC |
| | | | [SEQ ID NO: 19] | [SEQ ID NO: 40] | [SEQ ID NO: 61] |
| fragment_5298507- | 206 . . . 237 . . . 291 | 61335 | AGCCCAACATCTTTGAT | CGCCCAGGCATTAAA | CATCGCTCATTGACTT |
| 5299488 | | | TGTACTCA | TGAACCTA | TAA |
| | | | [SEQ ID NO: 20] | [SEQ ID NO: 41] | [SEQ ID NO: 62] |
| fragment_5298507- | 163 . . . 196 . . . 241 | 61339 | CTCGAGGCCAAATTTCT | CGATGCCCCTTTGAG | TTGGGCTGGAGTTAAC |
| 5299488 | | | TCTTTAAATAGG | TACAATCA | G |
| | | | [SEQ ID NO: 21] | [SEQ ID NO: 42] | [SEQ ID NO: 63] |
| fragment_5298507- | 112 . . . 141 . . . 207 | 61344 | ATTGCGAATAACCATCA | CTGGAGTTAACGAAG | ACTCGTGAGGGTAGAA |
| 5299488 | | | CAAAACAACT | GCCTATTTAAAGA | AT |
| | | | [SEQ ID NO: 22] | [SEQ ID NO: 43] | [SEQ ID NO: 64] |
| fragment_5298507- | 5 . . . 38 . . . 96 | 61346 | CGTTTATCACACTGATA | CTGGCATTTGCTGGT | ACCACAAAGGGAGTCT |
| 5299488 | | | TTCAGAATCACTACT | GGTTT | TTT |
| | | | [SEQ ID NO: 23] | [SEQ ID NO: 44] | [SEQ ID NO: 65] |
| fragment_5351200- | 185 . . . 245 . . . 299 | 61328 | AGGCCAAATGGCCATAT | TGCGGCTGCTTATTA | AAGAAATGACTTAGAA |
| 5352643 | | | TTTTAAAATAGTTATC | TGTTAACTGT | GATTATCTC |
| | | | [SEQ ID NO: 24] | [SEQ ID NO: 45] | [SEQ ID NO: 66] |
| fragment_5351200- | 57 . . . 94 . . . 137 | 61337 | CGCTAACGCGGCCATAT | GCGAAACCCTGCAGA | TCGCTGATTATCTTTC |
| 5352643 | | | TAATTAAA | TGGA | ATCATATT |
| | | | [SEQ ID NO: 25] | [SEQ ID NO: 46] | [SEQ ID NO: 67] |
| fragment_5351200- | 117 . . . 137 . . . 198 | 61343 | ACTCCATCTGCAGGGTT | TGGCCATTTGGCCTA | CCCACCAGTATAAATT |
| 5352643 | | | TCG | CAACATAT | GTG |
| | | | [SEQ ID NO: 26] | [SEQ ID NO: 47] | [SEQ ID NO: 68] |

[0144] Detecting the presence of at least one target signature sequences may also comprise methods such as amplification, hybridization, mass spectrometry, nanostring, microfluidics, chemiluminescence, enzyme technologies and combinations thereof.

[0145] Detecting the presence of an amplified product of a target signature sequence using probes as described above may comprise providing at least a first probe (and in some embodiments additional probes), the first probe operable to identify the first amplified target polynucleotide sequence, the first probe further comprises a first label (which may be a dye, a radioactive isotope, a chemiluminescent label, and an enzyme, the dye comprises a fluorescein dye, a rhodamine dye, or a cyanine dye); and hybridizing the first probes to a PCR amplified fragment to detect the presence of a first amplified target polynucleotide sequence from the sample, which is indicative of the presence of a target signature sequence which in turn is indicative of the presence of E. coli O104:H4 in a sample.

[0146] Some embodiments of a method may comprise detection of at least one target signature nucleic acid sequence to detect the presence of E. coli O104:H4 in a sample. Some embodiments of a method may comprise detecting the presence of at least two target signature nucleic acid sequences to detect the presence of E. coli O104:H4 in a sample. In some embodiments, detection of at least one of these nucleic acid sequences confirms the presence of E. coli O104:H4 in a sample while the absence of detection of one or more of the signature sequences rules out the presence of E. coli O104:H4 in the sample.

### Example 2

### Methods to Detect E. Coli O104:H4 by Detecting Combinations of Genes/Genetic Loci Found in an Outbreak Strain

[0147] In some embodiments methods are described comprising assays designed to detect combinations of multiple genes that are present in the 2011 European outbreak E. Coli O104:H4 strains. These specific combinations of genes have been identified as being present in the outbreak strains and are not present in other closely related strains and serotypes. Accordingly, assays of the disclosure comprise using primer pairs and probe sequences designed to selectively amplify these genes present in the outbreak strains of E. Coli. Detection of combinations of these genes indicates the presence of an outbreak strain.

[0148] According to some embodiments, detecting the presence combinations of two or more target genes of E. coli O104:H4 selected from a shiga-toxin encoding locus Stx2, an O104 antigen encoding locus, a fliC_H4 locus encoding a H4 allele of a fliC gene, and a terD tellurite resistance gene comprising using probes and primer sequences described in Table 2 below (having SEQ ID NOS: 69-89) for detecting an O104 antigen encoding locus, a fliC_H4 locus encoding a H4 allele of the fliC gene, and a terD tellurite resistance gene and the use of probes and primer sequences comprising SEQ ID NOS: 105-107 (Table 3) for detecting the Stx2 locus are described.

[0149] According to some embodiments, detecting the presence combinations of target genes of E. coli O104:H4 selected from a shiga-toxin encoding locus Stx2, an O104 antigen encoding locus, a fliC_H4 locus encoding a H4 allele of the fliC gene, a terD tellurite resistance gene and a locus called AAF-I, which encodes aggregative fimbriae, comprising using probes and primer sequences described in Table 2 below (having SEQ ID NOs: 69-89) for detecting an O104 antigen encoding locus, a fliC_H4 locus encoding a H4 allele of the fliC gene, and a terD tellurite resistance gene; and the use of probe and primer sequences comprising SEQ ID NOs: 105-107 (Table 3) for detecting an Stx2 locus are described; and the use of probes and primer sequences described in Table 4 below having nucleic acid sequences for detecting the AAF-1 locus are described comprising for example SEQ ID NOs: 90-104.

[0150] In some embodiments the detection of at least two of these target genes or gene encoding loci indicates the presence of the European outbreak strain E Coli O104:H4 (including strains LB226692 and TY-2482). In some embodiments, the detection of all these target genes or gene encoding loci indicates the presence of the European outbreak strain E Coli O104:H4 (including strains LB226692 and TY-2482). In some embodiments, the assays described are multiplex assays.

[0151] Table 2 below describes primer and probe sequences for detecting the presence of a fliC_H4 locus encoding a H4 allele of the fliC gene, a terD tellurite resistance gene and an O104 antigen encoding locus. The Assay ID # is used to indicate one example embodiment of an assay. For example, Assay ID #61324 in Table 2 describes an example method of detection comprising the use of forward primer GCAACAAATCGACAGTACCACTTT (SEQ ID NO: 69), reverse primer GTTTCGCCGCGCTGAA (SEQ ID NO: 76) and probe CGCCATGCCGGACAC (SEQ ID NO. 83), all present in the same row, for the detection of a fliC_H4 gene.

TABLE 2

| Assay ID | | | |
|---|---|---|---|
| and Gene | Forward Primer | Reverse Primer | Probe |
| fliC_H4 | | | |
| 61324 | GCAACAAATCGACAGTACCACTTT | GTTTCGCCGCGCTGAA | CGCCATGCCGGACAC |
| | [SEQ ID NO: 69] | [SEQ ID NO: 76] | [SEQ ID NO: 83] |
| 61325 | TGCGGATGTCAAGGATGCT | GCAGAATCAACGACCGCATATTTAG | CAGTGTAAGACAGTAAATTG |
| | [SEQ ID NO: 70] | [SEQ ID NO: 77] | [SEQ ID NO: 84] |
| 61326 | TGCGGATGTCAAGGATGCT | GCAGAATCAACGACCGCATATTTAG | ACACCGCGTCTAACAGT |
| | [SEQ ID NO: 71] | [SEQ ID NO: 78] | [SEQ ID NO: 85] |
| terD | | | |
| 61327 | GTAAAGCAGCTCCGTCAATGAAAA | CAAAGTCCTGACCGTCTGTTGA | ACGCGCATCCCAGCCAA |
| | [SEQ ID NO: 72] | [SEQ ID NO: 79] | [SEQ ID NO: 86] |
| O104 | | | |
| 61308 | CAGTTGGATAATCTGACAGGTGTCAT | GCGGAGGAAATTATTTCCGCAAT | ATACAGGTGTAATTCGTATTATC |
| | [SEQ ID NO: 73] | [SEQ ID NO: 80] | [SEQ ID NO: 87] |
| 61311 | TGCGCACCTGATCAAATTGTAATTG | TCGCACAATATCAATGGGTAAACGT | TAGCAAATCATCACTAATATAAC |
| | [SEQ ID NO: 74] | [SEQ ID NO: 81] | [SEQ ID NO: 88] |
| 61303 | TCCGTAATTGAAAAGCTTGGTGGAT | GCTGCAAGTATCCTAAGCCATAAGT | CATCATTATCTAATGGAAGATTAT |
| | [SEQ ID NO: 75] | [SEQ ID NO: 82] | [SEQ ID NO: 89] |

[0152] Assays described as Stx/VT2 (shiga toxin/verotoxin) may be used to detect an Stx locus and may include the use of the following probe and primer sequences as described in Table 3.

TABLE 3

| Gene ID # | Forward Primers | Reverse Primers | Probe |
|---|---|---|---|
| Stx/VT2 | GGGCAGTTATTTTGCTGTGGA | GAAAGTATTTGTTGCCGTATTAACGA | CGCGTTTTGACCATCT |
| | (SEQ ID NO: 105) | (SEQ ID NO: 106) | (SEQ ID NO: 107) |

[0153] Table 4 describes primer and probe sequences for detecting the presence of an AAF-1 locus. The Assay ID # is used to indicate one example embodiment assay. For example, Assay ID #61379 in this table comprises the use of forward primer GGCGGCTTGATTGTAGAGCAT (SEQ ID NO: 90), reverse primer CCAAGCGAATGTATTATCAGAGGATCA (SEQ ID NO: 95) and probe ACGGAGGTGTAATTATAAAAG (SEQ ID NO: 100), all present in the same row, for the detection of a AAF-1 locus.

TABLE 4

| Assay | | | |
|---|---|---|---|
| ID | Forward Primer | Reverse Primer | Probe |
| 61379 | GGCGGCTTGATTGTAGAGCAT | CCAAGCGAATGTATTATCAGAGGATCA | ACGGAGGTGTAATTATAAAAG |
| | [SEQ ID NO: 90] | [SEQ ID NO: 95] | [SEQ. ID NO: 100] |
| 61380 | GCAACTTGTGGAATTCCGAGTATT | CAGTAGCGATTGTGCTGACTTATCA | AAGCTACAGAAGACTATCATTTTA |
| | [SEQ ID NO: 91] | [SEQ ID NO: 96] | [SEQ ID NO: 101] |
| 61381 | ATCGCCTTTACACAGATCCATTGT | CGCCTTCGTATTGTCAAAACAGAA | ACGATCTATTGGAAAAGCTC |
| | [SEQ ID NO: 92] | [SEQ ID NO: 97] | [SEQ. ID NO.: 102] |
| 61382 | TGACTGCCCGGAAGACTTATTC | TTTGGGCCAGTTTGGAACCT | TCGGATCTTGGCGAATCA |
| | [SEQ ID NO: 93] | [SEQ ID NO: 98] | [SEQ ID NO: 103] |
| 61383 | ACTGCCCTCCTTTCTCAAGTAGA | TGTTTTCGAATAGAAAATGTAATCGCACAT | TTTGATGCCTCTTTATTAAAC |
| | [SEQ ID NO: 94] | [SEQ ID NO: 99] | [SEQ ID NO: 104] |

[0154] In the methods of the disclosure described, detecting each of the above referenced genes or gene loci to identify combination of genes, using the probes and primers described in this specification, may comprises using methods such as but not limited to amplification, hybridization, mass spectrometry, nanostring, microfluidics, chemiluminescence, enzyme technologies and combinations thereof. Amplification may comprise a polymerase chain reaction (PCR), RT-PCR, asynchronous PCR (A-PCR), and asymmetric PCR (AM-PCR), strand displacement amplification (SDA), multiple displacement amplification (MDA), nucleic acid strand-based amplification (NASBA), rolling circle amplification (RCA), transcription-mediated amplification (TMA). Methods may also further comprise isolating nucleic acid from a sample.

[0155] According to some embodiments, a method may comprise providing a first primer pair to amplify a first gene loci (selected from a shiga-toxin encoding locus Stx2, an O104 antigen encoding locus, a fliC_H4 locus encoding a H4 allele of the fliC gene, a terD tellurite resistance gene and a locus called AAF-I, which encodes aggregative fimbriae) and conditions for amplification to produce a first amplified target polynucleotide sequence. The method may then comprise detecting the first amplified target polynucleotide sequence (which corresponds to a first gene/locus as described above). In some embodiments, detecting may comprise providing a first probe operable to identify the first amplified target polynucleotide sequence. Since detecting a combination of genes described identifies an outbreak strain of E. coli O104:H4, a method generally may comprise detecting at least two of these genes. In some embodiments, a method may comprise detecting at least three of these genes/gene loci. In some embodiments, a method may comprise detecting at least four of these target geen/gene loci. In some embodiments, a method may comprise detecting detection of all five of these gene/gene loci.

[0156] Accordingly, a method of the disclosure, according to some embodiments, may comprise repeating the amplification and detection steps by providing at least a second primer pair to amplify a second gene/gene loci (and a third primer pair to amplify a third gene/gene loci; and a fourth primer pair to amplify a fourth gene/gene loci; and a fifth primer pair to amplify a fifth gene/gene loci) thereby amplifying a plurality of amplified target polynucleotide sequence (at least a second amplified target polynucleotide sequence (and in some embodiments at least a third, a fourth and a fifth amplified target polynucleotide sequence). Detection of the amplified target polynucleotide detects the presence of the corresponding gene or gene locus and presence of at least two (or more than two) of these genes/loci detects the presence of the outbreak strains of E. coli O104:H4.

[0157] In some embodiments, the present inventors have found that the assay designs described in Table 4 match and identify both outbreak strains of E. coli O104:H4 (LB226692 and TY-2482) but do not match and detect the historical HUSEC41 strain (the genomic sequence being comprised in SEQ ID NOs: 472-927).

### Example 3

### Methods to Distinguish Current 2011 European Outbreak Strains of E. Coli O104:H4 From Previous 2001 Outbreak Strain

[0158] Methods of the present disclosure, described above, were also screened against the HUSEC41 genome assembly described in SEQ ID NOs: 472-927, which is a historical European strain that caused hemolytic uremia syndrome (HUS) cases in the past. The HUSEC41 strain is phenotypically an E. coli O104:H4 Stx2+ eae−. The VT2 assays, designed to identify the Stx2 locus and fliC_H4 assays described in sections above perfectly matched this strain as well. HUSEC41 was also detected by the terD assay described above and several of the target signature nucleic acid sequence detecting assays (described in Example 1) also.

[0159] However, assays with ID numbers 61337 and 61343 (described in Table 1) were found to be completely specific for the two current E. coli O104:H4 outbreak isolates including the isolate described in the genome assemble described in SEQ ID NOs: 108-471 (also referred to as LB226692) as well as to the TY-2482 strain, and not to HUSEC41.

[0160] Accordingly, in some embodiments the present disclosure describes methods that are: 1) completely specific for the European 2011 outbreak strain (and may be used for e.g., for applications such as source tracking), as well as methods that are: 2) specific for the broader class of HUS-causing O104:H4 strains (e.g., for applications such as food safety testing).

[0161] Table 5 below describes various assay ID numbers (also described in previous tables and examples with details on probe and primer sequences) in relation to the specificity of strain detected.

TABLE 5

| | Strain of E. coli O104:H4 | | | |
|---|---|---|---|---|
| | LB226692 | | | |
| | (Sequences | | HUSEC41 | |
| | in SEQ | | (SEQ ID | |
| | ID NOs: | | NOs: | |
| Assay | 108-471) | TY2482 | 472-927) | |
| ID | (LTC) | (BGI) | (Muenster) | Specificity |
| 61342 | 0 | 0 | 0 | HUS-causing O104:H4 |
| 61340 | 0 | 0 | 0 | HUS-causing O104:H4 |
| 61332 | 0 | 0 | 0 | HUS-causing O104:H4 |
| 61347 | 0 | 0 | 0 | HUS-causing O104:H4 |
| 61334 | 0 | 0 | 0 | HUS-causing O104:H4 |
| 61336 | 0 | 0 | 0 | HUS-causing O104:H4 |
| 61341 | 0 | 0 | 0 | HUS-causing O104:H4 |
| 61345 | 0 | 0 | 0 | HUS-causing O104:H4 |
| 61331 | 0 | 0 | 0 | HUS-causing O104:H4 |
| 61330 | 0 | >250 | 0 | uncertain |
| 61346 | 0 | 0 | 0 | HUS-causing O104:H4 |
| 61329 | 0 | 0 | 0 | HUS-causing O104:H4 |
| 61344 | 0 | 0 | 0 | HUS-causing O104:H4 |
| 61339 | 0 | 0 | 0 | HUS-causing O104:H4 |
| 61335 | 0 | 0 | 0 | HUS-causing O104:H4 |
| 61337 | 0 | 0 | >250 | Outbreak-specific |
| 61343 | 0 | 0 | >250 | Outbreak-specific |
| 61328 | 0 | >250 | >250 | uncertain |
| 61338 | 0 | 0 | 158 | HUS-causing O104:H4* |
| 61333 | 0 | 0 | 20 | HUS-causing O104:H4* |
| 61348 | 0 | 0 | 60 | HUS-causing O104:H4* |

*detection of HUSEC41 may be weaker

[0162] Methods of the present disclosure were also screened against the two isolated strains of the current European outbreak, i.e., strain LB226692 which is described in the genome assemble described in SEQ ID NOs: 1 as well as to the TY-2482 strain. A summary of the assays performed and results are described below.

[0163] Both strains were detected by detection of the Stx2 using the VT2 assays; both strains were detected using the currently described fliC_H4 assays described in Assay ID Nos. 61324, 61325, 61326; both strains were detected using the currently described terD assay having Assay ID No. 61327; both strains were detected using the currently described O104 antigen assays having Assay ID No's. 61311, 61303, 61308; both strains were detected using the currently described target signature sequence assays of Table 1 with the exception of Assay ID No's 61328 and 61330.

[0164] While the foregoing specification teaches the principles of the present invention, with examples provided for the purpose of illustration, it will be appreciated by one skilled in the art from reading this disclosure that various changes in form and detail can be made without departing from the spirit and scope of the invention. These methods are not limited to any particular type of nucleic acid sample: plant, bacterial, animal (including human) total genome DNA, RNA, cDNA and the like may be analyzed using some or all of the methods disclosed in this disclosure. This disclosure provides powerful tools for analysis of complex nucleic acid samples. From experiment design to detection of E. coli O104:H4 assay results, the above disclosure provides for fast, efficient and inexpensive methods for detection of pathogenic E. coli O104:H4 strains.

[0165] All publications and patent applications cited above are incorporated by reference in their entirety for all purposes to the same extent as if each individual publication or patent application were specifically and individually indicated to be so incorporated by reference. Although the present invention has been described in some detail by way of illustration and example for purposes of clarity and understanding, it will be apparent that certain changes and modifications may be practiced within the scope of the appended claims.

The application's sequence listing, which the Patent Office published only in electronic form, follows.

SEQUENCE LISTING (927 sequences)

SEQ ID NO: 1 - DNA, 345 bp, Artificial Sequence
  Description of Artificial Sequence: Synthetic polynucleotide
gtgaaaaatgaaacgtatcgctattttgttaatattgttcttctctacaatagttttcgccaaaccaaaatcagataatggcgatcttaaaggcctgcaagaactcatgataacttcgaaatttgctggcatgtgcggcacaatcaaacaaatggcaacatttcaagaatcaacaaaaatgcctggcggagatgagttcttacagcgttttctgaccacagagcaagcaagactaggaatgaatccacaggaatttcttgaagcatgccagaagtcaatttcagcttataccaattattacaatctaacttctgataaataatagaaaggattttataaataact

SEQ ID NO: 2 - DNA, 1379 bp, Artificial Sequence
  Description of Artificial Sequence: Synthetic polynucleotide
caatctattatttgtcgaacaagtttcctttaatgcaacaaaaaattattttttcaaaataaacacactatttaatagcttgctaattttaccaaaatgtaactacatgattctcatgcaagacgtgtagtgataaagcaggctaaatcaccacactaaaaaccttcgaatttcgtagtgaaaaaagtcctttacacacctaatcaacacgatcaataatcactacactcaaatcaacacagaaggaaaatgaaaatggctaatattggatacattagggtatcgactgtgcaacaaaacacagaccgtcaattagctggagtaactcttgataaagtctttgaagataaagcgtcaggcaagaacactcagcgcccacagtttgaggcaatgatgaactatgtgcgggagggtgacgtgttacacgtccatagtattgatcgcctttgtcgtaatacagccgaccttctggcaacggttgagcaattaacagagcgcggcgtgtctgtgcatttccataaagaagactttaagacagggaagaactctcccgcagggaatatgatgctcacagtgcttgcagcagtggcacaaatggaacgtgaaatgatgcttgagcggcagcgtgaggggatcgccgcagctaaggccgctggacgtatagcaaaacgtggtaatggaaaagcaattgatcgagcgggaattgttgccgctctcgcgaatggtggatcaattcggagcgtagcaaaagatttcagtgtcagcacacagacggtgcaacgtatcaagaaagagcaggaagcgtaatgcctcctgatatttgagaattgtcgctgcgtggacctgacgccgctgatcttcgcgttaaacattgatcacgtctgcgccgatttcagagaaaaagacagtaactgaactcactatgaaggctaaacgtatctttacacttgatgaaaacgttcaaaaaacaacctaaccccaaaattcaacaaattgcaacacattgtttttaaaagaaaattaaatctacatcaaatattggttgacgtagattgaggtgaatagtagactattagggtaaattaccacccttgtaacatcatttaatgcatgttctaatcttcctatcgtaaaaccggaggaagttatgcatttactttcaaaacatcttcacactattcactttctcgttattgatgtattcgttgtggctattagttaccgcatttgcatcgcttccagtgaagagatggacgctgttgcaattattgctcaagcaatggcgatgttaactaaacgactttaataatttcactatcaggtgcataaacacatctttgatcgctggatgtgttatgcgcctactggtggttcaatcc

SEQ ID NO: 3 - DNA, 192 bp, Artificial Sequence
  Description of Artificial Sequence: Synthetic polynucleotide
acaactcagtaaacagctataccccgtcatgagagaactgaactctgattactatggaaagctgtttgatctggcctacgaaactcgtcatataaccaaccggactcgcgacacattgctccgcgaagcagcaaaacttgatcccgccaactatacggtgcacagggccagaagtatgctggcgcaactaag

SEQ ID NO: 4 - DNA, 981 bp, Artificial Sequence
  Description of Artificial Sequence: Synthetic polynucleotide
aatacgtttatcacactgatattcagaatcactactgaaagactccctttgtggtgcgcgagggatgcgcataaaaaaaccaccagcaaatgccagtggctaaagatattcattgcgaataaccatcacaaaacaacttaactcgtgagggtagaaattttactcgaggccaaatttcttctttaaataggccttcgttaactccagcccaacatctttgattgtactcaaaggggcatcgctcattgactttaatttctcaaaaccgtaggttcatttaatgcctgggcgaattcttgtccctgcgcagatagtcgcacgtcggtacccatatctagcatatggccacaatggcgcatgtagcccagtttagttatgtcatccgttattagatctttattactgatataaccttgctcaataagaagtagataatgaaacatcccttcattcgagcagatatcgtaccccgcattagctaagtcttttgtagatataaagggagttttcgctttcaaaaatacctcaagcatccccttcatgtattctaaatttttaaccacaaaaacctccttaggataattggaggtctagaataccgtttgcaagcacgttgataaatcattatcacaggcactcaatgaatgcctgctgtaattgcgtacggtaatgaacgtaaaaaaccgcccgaggtatatttagacattagatggcgctttgtcagtatagacccggtacgccctgacaaacatcccgttacattcagagtccgccttgatatacgccaattcgtaaccccgatgctttagctcttcacgagctcttttctcttccttagccatgaagttaagatctttaatttctgagtaggtatatgttcccactataaaatctctgcctggccgtccatttatcagttccatgtgtcctcccaaaaagttggtagtcagaacataccatgctaagcgaggtgaaagcacc

SEQ ID NO: 5 - DNA, 1443 bp, Artificial Sequence
  Description of Artificial Sequence: Synthetic polynucleotide
atgtcttaaatgtattagttcagatatgtactagcaataaacatagttagaaaggccgctaacgcggccatattaattaaaactccagttactaatattgagaaagataatcagcgactccatctgcagggtttcgcccaccagtataaattgtgcctaattcttgaggtgtaacatatgttgtaggccaaatggccatatttttaaaatagttatctatttttattctttgaagttctttaaagagataatcttctaagtcatttctttttagacagttaacataataagcagccgcacttgctactatatctacaatttgtaattgaggatactcttgtgatgaatggaatgtcaaagaacgagctttaattggcaattcaaattttcttcgatcataaccatatgcctccgtaatttttgatatatccataaatttatcaaaaatatctttcttctctgtaatagctttggaatcgtcatgcttaatataaaaaccattagggtataatttaccccattctacacagtgtctaaagaggcttggtatagatggatctaatgtgcttttctcaacaccttccaatatatcatcaatatcgcttctggtaatactaattctgtttattatatctgtgaatatcttatcacttgagcatatctttaactcatcaattaccctgtaaaattcatcaattgactcagtcgattggcttctgatcatattcataaaacactgatacattacctctgttttttcctccccacagaaagcagggaaacagaaatagtaaacattagacagagctagattctgtccatttatataaagatctattcctctattagagcaccacgtctcgatcaaaatatcaacaatctttgctgttagcatgtattttttatcgaccaagtatattttaacattctcttcattgacatatttgctttcaagaagcctaatgatgccatcctgaccagattttctacgtctaagagttttaaagtgggcttctgttggagacttgcttccggttagttctaatgccttaagcgcatcctgtttactaatactacttgaacttaaggtaaaaacaggttgcaatggatcgagtaaatttccgccagtattacctgattcatcaaaaaatatatcaggctttatatacaacattttatttatctttgccgctaagtttctttttttctcattttctcgcttaattttattatctcgcctacgttgactattctttcccataaatacctcacaatctgaattagatatcccaatttaacgcattaataacataatgttatgatatcacacaatcaaaataacgtgctgattttaatgtatcaggtttgactagctattctttgataagcgaataataagaatgtcagcccctcaactcaaagcggtttagtcagttggaatcg

SEQ ID NO: 6 - DNA, 23 bp, Artificial Sequence
  Description of Artificial Sequence: Synthetic primer
acttcgaaatttgctggcatgtg

SEQ ID NO: 7 - DNA, 24 bp, Artificial Sequence
  Description of Artificial Sequence: Synthetic primer
acagagcaagcaagactaggaatg

SEQ ID NO: 8 - DNA, 27 bp, Artificial Sequence
  Description of Artificial Sequence: Synthetic primer
tttcgccaaaccaaaatcagataatgg

SEQ ID NO: 9 - DNA, 29 bp, Artificial Sequence
  Description of Artificial Sequence: Synthetic primer
gtgaaaaatgaaacgtatcgctattttgt

SEQ ID NO: 10 - DNA, 21 bp, Artificial Sequence
  Description of Artificial Sequence: Synthetic primer
acaaaaatgcctggcggagat

SEQ ID NO: 11 - DNA, 27 bp, Artificial Sequence
  Description of Artificial Sequence: Synthetic primer
tcgaacaagtttcctttaatgcaacaa

SEQ ID NO: 12 - DNA, 40 bp, Artificial Sequence
  Description of Artificial Sequence: Synthetic primer
attttttcaaaataaacacactatttaatagcttgctaat

SEQ ID NO: 13 - DNA, 30 bp, Artificial Sequence
  Description of Artificial Sequence: Synthetic primer
acacgatcaataatcactacactcaaatca

SEQ ID NO: 14 - DNA, 26 bp, Artificial Sequence
  Description of Artificial Sequence: Synthetic primer
ccacactaaaaaccttcgaatttcgt

SEQ ID NO: 15 - DNA, 24 bp, Artificial Sequence
  Description of Artificial Sequence: Synthetic primer
tgcaagacgtgtagtgataaagca

SEQ ID NO: 16 - DNA, 20 bp, Artificial Sequence
  Description of Artificial Sequence: Synthetic primer
cgcgaagcagcaaaacttga

SEQ ID NO: 17 - DNA, 22 bp, Artificial Sequence
  Description of Artificial Sequence: Synthetic primer
cccgtcatgagagaactgaact

SEQ ID NO: 18 - DNA, 23 bp, Artificial Sequence
  Description of Artificial Sequence: Synthetic primer
gctgtttgatctggcctacgaaa

SEQ ID NO: 19 - DNA, 19 bp, Artificial Sequence
  Description of Artificial Sequence: Synthetic primer
gcgagggatgcgcataaaa

SEQ ID NO: 20 - DNA, 25 bp, Artificial Sequence
  Description of Artificial Sequence: Synthetic primer
agcccaacatctttgattgtactca

SEQ ID NO: 21 - DNA, 29 bp, Artificial Sequence
  Description of Artificial Sequence: Synthetic primer
ctcgaggccaaatttcttctttaaatagg

SEQ ID NO: 22 - DNA, 27 bp, Artificial Sequence
  Description of Artificial Sequence: Synthetic primer
attgcgaataaccatcacaaaacaact

SEQ ID NO: 23 - DNA, 32 bp, Artificial Sequence
  Description of Artificial Sequence: Synthetic primer
cgtttatcacactgatattcagaatcactact

SEQ ID NO: 24 - DNA, 33 bp, Artificial Sequence
  Description of Artificial Sequence: Synthetic primer
aggccaaatggccatatttttaaaatagttatc

SEQ ID NO: 25 - DNA, 25 bp, Artificial Sequence
  Description of Artificial Sequence: Synthetic primer
cgctaacgcggccatattaattaaa

SEQ ID NO: 26 - DNA, 20 bp, Artificial Sequence
  Description of Artificial Sequence: Synthetic primer
actccatctgcagggtttcg

SEQ ID NO: 27 - DNA, 20 bp, Artificial Sequence
  Description of Artificial Sequence: Synthetic primer
tcatctccgccaggcatttt

SEQ ID NO: 28 - DNA, 24 bp, Artificial Sequence
  Description of Artificial Sequence: Synthetic primer
gaaattgacttctggcatgcttca

SEQ ID NO: 29 - DNA, 25 bp, Artificial Sequence
  Description of Artificial Sequence: Synthetic primer
cacatgccagcaaatttcgaagtta

SEQ ID NO: 30 - DNA, 24 bp, Artificial Sequence
  Description of Artificial Sequence: Synthetic primer
caggcctttaagatcgccattatc

SEQ ID NO: 31 - DNA, 24 bp, Artificial Sequence
  Description of Artificial Sequence: Synthetic primer
cattcctagtcttgcttgctctgt

SEQ ID NO: 32 - DNA, 30 bp, Artificial Sequence
  Description of Artificial Sequence: Synthetic primer
tgcatgagaatcatgtagttacattttggt

SEQ ID NO: 33 - DNA, 25 bp, Artificial Sequence
  Description of Artificial Sequence: Synthetic primer
tgctttatcactacacgtcttgcat

SEQ ID NO: 34 - DNA, 25 bp, Artificial Sequence
  Description of Artificial Sequence: Synthetic primer
gttgcacagtcgataccctaatgta

SEQ ID NO: 35 - DNA, 27 bp, Artificial Sequence
  Description of Artificial Sequence: Synthetic primer
ccttctgtgttgatttgagtgtagtga

SEQ ID NO: 36 - DNA, 28 bp, Artificial Sequence
  Description of Artificial Sequence: Synthetic primer
gtgtgtaaaggacttttttcactacgaa

SEQ ID NO: 37 - DNA, 20 bp, Artificial Sequence
  Description of Artificial Sequence: Synthetic primer
gttgcgccagcatacttctg

SEQ ID NO: 38 - DNA, 22 bp, Artificial Sequence
  Description of Artificial Sequence: Synthetic primer
cgagtttcgtaggccagatcaa

SEQ ID NO: 39 - DNA, 18 bp, Artificial Sequence
  Description of Artificial Sequence: Synthetic primer
gcttcgcggagcaatgtg

SEQ ID NO: 40 - DNA, 25 bp, Artificial Sequence
  Description of Artificial Sequence: Synthetic primer
accctcacgagttaagttgttttgt

SEQ ID NO: 41 - DNA, 23 bp, Artificial Sequence
  Description of Artificial Sequence: Synthetic primer
cgcccaggcattaaatgaaccta

SEQ ID NO: 42 - DNA, 23 bp, Artificial Sequence
  Description of Artificial Sequence: Synthetic primer
cgatgcccctttgagtacaatca

SEQ ID NO: 43 - DNA, 28 bp, Artificial Sequence
  Description of Artificial Sequence: Synthetic primer
ctggagttaacgaaggcctatttaaaga

SEQ ID NO: 44 - DNA, 21 bp, Artificial Sequence
  Description of Artificial Sequence: Synthetic primer
ctggcatttgctggtggtttt

SEQ ID NO: 45 - DNA, 25 bp, Artificial Sequence
  Description of Artificial Sequence: Synthetic primer
tgcggctgcttattatgttaactgt

SEQ ID NO: 46 - DNA, 19 bp, Artificial Sequence
  Description of Artificial Sequence: Synthetic primer
gcgaaaccctgcagatgga

SEQ ID NO: 47 - DNA, 23 bp, Artificial Sequence
  Description of Artificial Sequence: Synthetic primer
tggccatttggcctacaacatat

SEQ ID NO: 48 - DNA, 21 bp, Artificial Sequence
  Description of Artificial Sequence: Synthetic probe
atgttgccatttgtttgattg

SEQ ID NO: 49 - DNA, 15 bp, Artificial Sequence
  Description of Artificial Sequence: Synthetic probe
atccacaggaatttc

SEQ ID NO: 50 - DNA, 16 bp, Artificial Sequence
  Description of Artificial Sequence: Synthetic probe
aaggcctgcaagaact

SEQ ID NO: 51 - DNA, 22 bp, Artificial Sequence
  Description of Artificial Sequence: Synthetic probe
ttcttctctacaatagttttcg

SEQ ID NO: 52 - DNA, 17 bp, Artificial Sequence
  Description of Artificial Sequence: Synthetic probe
aaacgctgtaagaactc

SEQ ID NO: 53 - DNA, 25 bp, Artificial Sequence
  Description of Artificial Sequence: Synthetic probe
tagtgtgtttattttgaaaaaataa

SEQ ID NO: 54 - DNA, 23 bp, Artificial Sequence
  Description of Artificial Sequence: Synthetic probe
caaaatgtaactacatgattctc

SEQ ID NO: 55 - DNA, 19 bp, Artificial Sequence
  Description of Artificial Sequence: Synthetic probe
ttagccattttcattttcc

SEQ ID NO: 56 - DNA, 20 bp, Artificial Sequence
  Description of Artificial Sequence: Synthetic probe
cctttacacacctaatcaac

SEQ ID NO: 57 - DNA, 20 bp, Artificial Sequence
  Description of Artificial Sequence: Synthetic probe
tttagtgtggtgatttagcc

SEQ ID NO: 58 - DNA, 16 bp, Artificial Sequence
  Description of Artificial Sequence: Synthetic probe
tcccgccaactatacg

SEQ ID NO: 59 - DNA, 20 bp, Artificial Sequence
  Description of Artificial Sequence: Synthetic probe
acagctttccatagtaatca

SEQ ID NO: 60 - DNA, 16 bp, Artificial Sequence
  Description of Artificial Sequence: Synthetic probe
accaaccggactcgcg

SEQ ID NO: 61 - DNA, 18 bp, Artificial Sequence
  Description of Artificial Sequence: Synthetic probe
cagtggctaaagatattc

SEQ ID NO: 62 - DNA, 19 bp, Artificial Sequence
  Description of Artificial Sequence: Synthetic probe
catcgctcattgactttaa

SEQ ID NO: 63 - DNA, 17 bp, Artificial Sequence
  Description of Artificial Sequence: Synthetic probe
ttgggctggagttaacg

SEQ ID NO: 64 - DNA, 18 bp, Artificial Sequence
  Description of Artificial Sequence: Synthetic probe
actcgtgagggtagaaat

SEQ ID NO: 65 - DNA, 18 bp, Artificial Sequence
  Description of Artificial Sequence: Synthetic probe
accacaaagggagtcttt

SEQ ID NO: 66 - DNA, 25 bp, Artificial Sequence
  Description of Artificial Sequence: Synthetic probe
aagaaatgacttagaagattatctc

SEQ ID NO: 67 - DNA, 24 bp, Artificial Sequence
  Description of Artificial Sequence: Synthetic probe
tcgctgattatctttctcaatatt

SEQ ID NO: 68 - DNA, 19 bp, Artificial Sequence
  Description of Artificial Sequence: Synthetic probe
cccaccagtataaattgtg

SEQ ID NO: 69 - DNA, 24 bp, Artificial Sequence
  Description of Artificial Sequence: Synthetic primer
gcaacaaatcgacagtaccacttt

SEQ ID NO: 70 - DNA, 19 bp, Artificial Sequence
  Description of Artificial Sequence: Synthetic primer
tgcggatgtcaaggatgct

SEQ ID NO: 71 - DNA, 19 bp, Artificial Sequence
  Description of Artificial Sequence: Synthetic primer
tgcggatgtcaaggatgct

SEQ ID NO: 72 - DNA, 24 bp, Artificial Sequence
  Description of Artificial Sequence: Synthetic primer
gtaaagcagctccgtcaatgaaaa

SEQ ID NO: 73 - DNA, 26 bp, Artificial Sequence
  Description of Artificial Sequence: Synthetic primer
cagttggataatctgacaggtgtcat

SEQ ID NO: 74 - DNA, 25 bp, Artificial Sequence
  Description of Artificial Sequence: Synthetic primer
tgcgcacctgatcaaattgtaattg

SEQ ID NO: 75 - DNA, 25 bp, Artificial Sequence
  Description of Artificial Sequence: Synthetic primer
tccgtaattgaaaagcttggtggat

SEQ ID NO: 76 - DNA, 16 bp, Artificial Sequence
  Description of Artificial Sequence: Synthetic primer
gtttcgccgcgctgaa

SEQ ID NO: 77 - DNA, 25 bp, Artificial Sequence
  Description of Artificial Sequence: Synthetic primer
gcagaatcaacgaccgcatatttag

SEQ ID NO: 78 - DNA, 25 bp, Artificial Sequence
  Description of Artificial Sequence: Synthetic primer
gcagaatcaacgaccgcatatttag

SEQ ID NO: 79 - DNA, 22 bp, Artificial Sequence
  Description of Artificial Sequence: Synthetic primer
caaagtcctgaccgtctgttga

SEQ ID NO: 80 - DNA, 23 bp, Artificial Sequence
  Description of Artificial Sequence: Synthetic primer
gcggaggaaattatttccgcaat

SEQ ID NO: 81 - DNA, 25 bp, Artificial Sequence
  Description of Artificial Sequence: Synthetic primer
tcgcacaatatcaatgggtaaacgt

SEQ ID NO: 82 - DNA, 25 bp, Artificial Sequence
  Description of Artificial Sequence: Synthetic primer
gctgcaagtatcctaagccataagt

SEQ ID NO: 83 - DNA, 15 bp, Artificial Sequence
  Description of Artificial Sequence: Synthetic probe
cgccatgccggacac

SEQ ID NO: 84 - DNA, 20 bp, Artificial Sequence
  Description of Artificial Sequence: Synthetic probe
cagtgtaagacagtaaattg

SEQ ID NO: 85 - DNA, 17 bp, Artificial Sequence
  Description of Artificial Sequence: Synthetic probe
acaccgcgtctaacagt

SEQ ID NO: 86 - DNA, 17 bp, Artificial Sequence
  Description of Artificial Sequence: Synthetic probe
acgcgcatcccagccaa

SEQ ID NO: 87 - DNA, 23 bp, Artificial Sequence
  Description of Artificial Sequence: Synthetic probe
atacaggtgtaattcgtattatc

SEQ ID NO: 88 - DNA, 23 bp, Artificial Sequence
  Description of Artificial Sequence: Synthetic probe
tagcaaatcatcactaatataac

SEQ ID NO: 89 - DNA, 24 bp, Artificial Sequence
  Description of Artificial Sequence: Synthetic probe
catcattatctaatggaagattat

SEQ ID NO: 90 - DNA, 21 bp, Artificial Sequence
  Description of Artificial Sequence: Synthetic primer
ggcggcttgattgtagagcat

SEQ ID NO: 91 - DNA, 24 bp, Artificial Sequence
  Description of Artificial Sequence: Synthetic primer
gcaacttgtggaattccgagtatt

SEQ ID NO: 92 - DNA, 24 bp, Artificial Sequence
  Description of Artificial Sequence: Synthetic primer
atcgcctttacacagatccattgt

SEQ ID NO: 93 - DNA, 22 bp, Artificial Sequence
  Description of Artificial Sequence: Synthetic primer
tgactgcccggaagacttattc

SEQ ID NO: 94 - DNA, 23 bp, Artificial Sequence
  Description of Artificial Sequence: Synthetic primer
actgccctcctttctcaagtaga

SEQ ID NO: 95 - DNA, 27 bp, Artificial Sequence
  Description of Artificial Sequence: Synthetic primer
ccaagcgaatgtattatcagaggatca

SEQ ID NO: 96 - DNA, 25 bp, Artificial Sequence
  Description of Artificial Sequence: Synthetic primer
cagtagcgattgtgctgacttatca

SEQ ID NO: 97 - DNA, 24 bp, Artificial Sequence
  Description of Artificial Sequence: Synthetic primer
cgccttcgtattgtcaaaacagaa

SEQ ID NO: 98 - DNA, 20 bp, Artificial Sequence
  Description of Artificial Sequence: Synthetic primer
tttgggccagtttggaacct

SEQ ID NO: 99 - DNA, 30 bp, Artificial Sequence
  Description of Artificial Sequence: Synthetic primer
tgttttcgaatagaaaatgtaatcgcacat

SEQ ID NO: 100 - DNA, 21 bp, Artificial Sequence
  Description of Artificial Sequence: Synthetic probe
acggaggtgtaattataaaag

SEQ ID NO: 101 - DNA, 24 bp, Artificial Sequence
  Description of Artificial Sequence: Synthetic probe
aagctacagaagactatcatttta

SEQ ID NO: 102 - DNA, 20 bp, Artificial Sequence
  Description of Artificial Sequence: Synthetic probe
acgatctattggaaaagctc

SEQ ID NO: 103 - DNA, 18 bp, Artificial Sequence
  Description of Artificial Sequence: Synthetic probe
tcggatcttggcgaatca

SEQ ID NO: 104 - DNA, 21 bp, Artificial Sequence
  Description of Artificial Sequence: Synthetic probe
tttgatgcctctttattaaac

SEQ ID NO: 105 - DNA, 21 bp, Artificial Sequence
  Description of Artificial Sequence: Synthetic primer
gggcagttattttgctgtgga

SEQ ID NO: 106 - DNA, 26 bp, Artificial Sequence
  Description of Artificial Sequence: Synthetic primer
gaaagtatttgttgccgtattaacga

SEQ ID NO: 107 - DNA, 16 bp, Artificial Sequence
  Description of Artificial Sequence: Synthetic probe
cgcgttttgaccatct

SEQ ID NO: 108 - DNA, 216371 bp, Escherichia coli
  modified_base (22446)..(22450): a, c, t, g, unknown or other
  modified_base (22453)..(22463): a, c, t, g, unknown or other
  modified_base (64425)..(64426): a, c, t, g, unknown or other
  modified_base (64428)..(64429): a, c, t, g, unknown or other
  modified_base (64436)..(64436): a, c, t, g, unknown or other
  modified_base (64438)..(64440): a, c, t, g, unknown or other
  modified_base (82967)..(82967): a, c, t, g, unknown or other
caatgttgcaccgtttgctgcatgatattgaaaaaatatcaccaaataaaaaacgccttagtaagtatttttcagcttttcattctgactgcaacgggcaatatgtctctgtgtggattaaaaaagagtgtctgatagcagcttctgaactggttacctgccgtgagtaaattaaaattttattgacttaggtcactaaatactttaaccaatataggcatagcgcacagacagataaaaattacagagtacacaacatccatgaaacgcattagcaccaccattaccaccaccatcaccattaccacaggtaacggtgcgggctgacgcgtacaggaaacacagaaaaaagcccgcacctgacagtgcgggcttttttttcgaccaaaggtaacgaggtaacaaccatgcgagtgttgaagttcggcggtacatcagtggcaaatgcagaacgttttctgcgtgttgccgatattctggaaagcaatgccaggcaggggcaggtggccaccgtcctctctgcccccgccaaaatcaccaaccacctggtggcgatgattgaaaaaaccattagcggccaggatgctttacccaatatcagcgatgccgaacgtatttttgccgaacttttgacgggactcgccgccgcccagccggggttcccgctggcgcaattgaaaactttcgtcgatcaggaatttgcccaaataaaacatgtcctgcatggcattagtttgttggggcagtgcccggatagcatcaacgctgcgctgatttgccgtggcgagaaaatgtcgatcgccattatggccggcgtgttagaagcgcgtggtcacaacgttaccgttatcgatccggtcgaaaaactgctggcagtggggcattacctcgaatctaccgtcgatattgctgagtccacccgccgtattgcggcaagccgcattccggctgatcacatggtgttgatggcaggtttcaccgccggtaatgaaaaaggcgaactggtggtacttggacgcaacggttccgactactccgcggcggtgctggctgcctgtttacgcgccgattgttgcgagatttggacggacgttgacggggtctatacctgcgacccgcgtcaggtgcccgatgcgaggttgttgaagtcgatgtcctaccaggaagcgatggagctttcctacttcggcgctaaagttcttcacccccgcaccattacccccatcgcccagttccagatcccttgcctgattaaaaataccggaaatcctcaagcaccaggtacgctcattggtgccagtcgtgatgaagacgaattaccggtcaagggcatttccaatctgaataacatggcaatgttcagcgtttccggcccggggatgaaaggaatggtcggcatggcggcgcgcgtctttgccgcgatgtcacgcgcccgtatttccgtggtgctgattacgcaatcatcttccgaatacagtatcagtttctgcgttccacaaagcgactgtgtgcgagctgaacgggcaatgcaggaagagttctacctggaactgaaagaaggcttactggagccgctggcggtgacggaacggctggccattatctcggtggtaggtgatggtatgcgcaccttgcgtgggatctcggcgaaattctttgccgcgctggcccgcgccaatatcaacattgtcgccattgctcagggatcttctgaacgctcaatctctgtcgtggtaaataacgatgatgcgaccactggcgtgcgcgttactcatcagatgctgttcaataccgatcaggttatcgaagtgtttgtgattggcgtcggtggcgttggcggtgcgctgctggagcaactgaagcgtcaacaaagctggctgaagaataaacatatcgacttacgtgtctgcggtgttgccaactcgaaggcactgctcaccaatgtgcatggcctaaatctggaaaactggcaggaagaactggcgcaagccaaagagccgtttaatctcgggcgcttaattcgcctcgtgaaagaatatcatctgctgaacccggtcattgttgactgcacctccagccaggcagtggcggatcaatatgccgacttcctgcgcgaaggtttccacgttgtcacgccgaacaaaaaggccaacacctcgtcgatggattactaccatctgttgcgtcatgcggcggaaaaatcgcggcgtaaattcctctatgacaccaacgttggggctggattaccggttattgagaacctgcaaaatctgctcaatgctggtgatgaattgatgaagttctccggcattctttcaggttcgctttcttatatcttcggcaagttagacgaaggcatgagtttctccgaggcgactactctggcgcgggaaatgggttataccgaaccggatccgcgagatgatctttctggtatggatgtagcgcgtaagctattgattctcgctcgtgaaacgggacgtgaactggagctggcggatattgaaattgaacctgtgctgcccgcagagtttaacgctgagggtgatgttgccgcttttatggcgaatctgtcacagctcgacgatctctttgccgcgcgcgtggcgaaggcccgtgatgaaggaaaagttttgcgctatgttggcaatattgatgaagatggtgcctgccgcgtgaagattgccgaagtggatggtaatgatccgctgttcaaagtgaaaaatggcgaaaacgccctggccttttatagccactattatcagccgctgccgttggtgctgcgcggatatggtgcgggcaatgacgttacagctgccggtgtctttgccgatctgctacgtaccctctcatggaagttaggagtctgacatggttaaagtttatgccccggcttccagtgccaatatgagcgtcgggtttgatgtgctcggggcggcggtgacacctgttgatggtgcattgctcggagatgtagtcacggttgaggcggcagagacattcagtctcaacaacctcggacgctttgccgataagctgccgtcagaaccacgggaaaatatcgtttatcagtgctgggagcgtttttgccaggagcttggcaagcaaattccagtggcgatgactctggaaaagaatatgccaatcggttcgggcttaggctccagcgcctgttcggtggtcgcggcgctgatggcgatgaatgaacactgtggcaagccgcttaatgacactcgtttgctggctttgatgggcgagctggaaggacgaatctccggcagcattcattacgacaacgtggcaccgtgttttcttggtggtatgcagttgatgatcgaagaaaacgacatcatcagccagcaagtgccagggtttgatgagtggctgtgggtgctggcgtatccggggattaaagtctcgacggcagaagccagggctattttaccggcgcagtatcgccgccaggattgcattgcgcacgggcgacatctggctggcttcattcacgcctgctattcccgtcagcctgagcttgccgcgaagctgatgaaagatgttatcgctgaaccctaccgtgaacggttactgcctggcttccggcaggcgcggcaggcggtcgcggaaatcggcgcggtagcgagcggtatctccggctccggcccgaccttgttcgctctatgtgacaagccggataccgcccagcgcgttgccgactggttgggtaagaactacctgcaaaatcaggaaggttttgttcatatttgccggctggatacggcgggcgcacgagtactggaaaactaaatgaaactctacaatctgaaagatcacaacgagcaggtcagctttgcgcaagccgtaacccaggggttgggcaaaaatcaggggctgttttttccgcatgacctgccggaattcagcctgactgaaattgatgagatgctgaagctggattttgtcacccgcagtgcgaagatcctctcggcgtttattggtgatgaaatcccgcaggaaatcctggaagagcgcgtgcgcgcggcgtttgccttcccggctccggtcgccaatgttgaaagcgatgtcggttgtctggaattgttccacgggccaacgctggcatttaaagatttcggcggtcgctttatggcacaaatgctgacccatattgcgggcgataagccagtgaccattctgaccgcgacctccggtgataccggagcggcagtggctcatgctttctacggtttaccgaatgtgaaagtggttatcctctatccacgaggcaaaatcagtccactgcaagaaaaactgttctgtacgttgggcggcaatatcgaaactgttgccatcgacggcgatttcgatgcctgtcaggcgctggtgaagcaggcgtttgatgatgaagaactgaaagtggcgctggggttaaactcagctaactcgattaacatcagccgtttgctggcgcagatttgctactactttgaagctgttgcgcagctgccgcaggaagcgcgcaaccagctggttgtctcggtgccaagcggaaacttcggcgatttgacggcgggtctgctggcgaagtcactcggtctgccggtgaaacgttttattgctgcgaccaacgtgaacgataccgtgccacgtttcctgcacgacggtcagtggtcacccaaagcgactcaggcgacgttatccaacgcgatggacgtgagtcagccgaacaactggccgcgtgtggaagagttgttccgccgcaaaatctggcaactgaaagagctgggttatgcagccgtggatgatgaaaccacgcaacagacaatgcgtgagttaaaagaactgggctacacctcggagccgcacgctgccgtagcgtatcgtgcgctgcgtgaccagttgaatccaggcgaatatggcttgttcctcggcaccgcgcatccggcgaaatttaaagagagcgtggaagcgattctcggtgaaacgttggatctgccaaaagagctggcagaacgtgctgatttacccttgctttcacataatctgcccgccgattttgctgcgttgcgtaaattgatgatgaatcatcagtaaaatctattcattatctcaatcaggccgggtttgcttttatgcagcccggcttttttatgaagaaattatggagaaaaacgacagggaaaaaggagaaattctcaataaatgcggtaacttagagattaggattgcggagaataacaaccgtcgttctcatcgcgtaatctccggatatcgacccataacgggcaatgataaaaggagtaacctgtgaaaaagatgcaatctatcgtactcgcactttccctggttctggtcgctcccatggcagcacaggctgcggaaattacgttagtcccgtcagtaaaattacagataggcgatcgtgataatcgtggctattactgggatggaggtcactggcgcgaccacggctggtggaaacaacattatgaatggcgaggcaatcgctggcacccacacggaccgccgccaccgccgcgccaccataagaaagctcctcatgatcatcacggcggtcatggtccaggcaaacatcaccgctaaatgacaaatgccgggtaacaatccggcattcagcgcctgatgcgacgctggcgcgtcttatcagtatctacgtgaattctgcaatatattgaatctgcatgcttttgtaggccggataaggcgttcacgccgcatccggcattgactacaaacttaacgctgctcgtagcgtttaaacaccagttcgccattgctggaggaatcttcatcaaagaagtaaccttcgctattaaaaccagtcagttgctctggtttggtcagccgattttcaataataaaacgactcatcagaccgcgtgctttcttagcgtagaagctgattatcttaaatttgccgttcttctcatcgaggaacaccggcttgataatctcggcattcaatttcttcggcttcaccgatttaaaatactcatctgacgccagattaatcaccacattatcgccttgtgctgcgagcgcctcgttcagcttgttggtgatgatatctccccagaattgatacagatctttccctcgggcattctcaagacggatccccatttccagacgataaggctgcattaaatcgagcgggcgcagtacgccatacaagccggaaagcattcgcaaatgctgttgggcaaaatcgaaatcgtcttcgctgaaggtttcggcctgcaagccggtgtagacatcacctttaaacgccagaatcgcctggcgggcattctccggcgtgaaatctggctgccagtcatgaaagcgagcggcgttgatacccgccagtttgtcgctgatgcgcatcagcgtgctaatctgcggaggcgtcagtttccgcgcttcatggatcaactgctgggaattgtctaacagctccggcagcgtatagcgcgtggtggtcaacgggctttggtaatcaagcgttttcgcaggtgaaataagaatcagcatatccagtccttgcaggaaatttatgccgactttagcaaaaaaagagaatgagttgatcgatagttgtgattactcctgcgaaacatcatcccacgcgtccggagaaagctggcgaccgatatccggataacgcaacggatcaaacaccgggcgcacgccgagtttacgctggcgtagataatcactggcaatggtatgaaccacaggcgagagcagtaaaatggcggtcaaattggtaatagccatgcaggccattatgatatctgccagttgccacatcagcggaaggcttagcaaggtgccgccgatgaccgttgcgaaggtgcagatccgcaaacaccagatcgctttagggttgttcaggcgtaaaaagaagagattgttttcggcataaatgtagttggcaacgatggagctgaaggcaaacagaataaccacgagggtaacaaactcagcaccccaggaacccattagcacccgcatcgccttctggataagctgaataccttccagcggcatgtaggttgtgccgttacccgccagtaatatcagcatggcgcttgccgtacagatgaccagggtgtcgataaaaatgccaatcatctggacaatcccttgcgctgccggatgcggaggccaggacgcagctgccgctgctgcgtttggtgtagaacccattcccgcctcattggaaaacatactgcgctgaaaaccgttagtaatcgcctggcttaaggtatatcccgccgcgccgcctgccgcttcctgccagccaaaagcactctcaaaaatagaccaaatgacgtggggaagttgcccgatattcattacgcaaatcaccaggctggtcagtacccagattatcgccatcaacgggacaaaaccctgcatgagccgggcgacgccatgaagaccgcgagtgattgccagcagagcaaagacagcgagaataatgcctgtcaccagcgggggaaaatcaaaagaaaaactcagggctcgggcaacggcgttcgcctgaactccgctgaaaattatgccgtaggcgatgagcaaaaagacggcgaacagaacgcccatccaacgcatccccagcccgcgcgccatataccatgccggtcctccacgaaactgtccattgacgtcacgttctttataaagttgtgcaagggaacattcggcaaacgaggtcgccatgccgataaacgcggcaacccacatccaaaagacggctccaggtccaccggcggtaatagccagcgcaacgccggccaggttgccgctacccacgcgcgccgcaagactggtacacaatgactgaaatgaggttaaaccgcctggctgtggatgaatgctatttttaagacttttgccaaactggcggatgtagcgaaactgcacaaatccggtgcgaaaagtgaaccaacaacctgcgccgaagagcaggtaaatcattaccgatccccaaaggacgctgttaataaaggagaaaaaatctggcatgcatatccctcttattgccggtcgcgatgactttcctgtgtaaacgttaccaattgtttaagaagtatatacgctacgaggtacttgataacttctgcgtagcatacatgaggttttgtataaaaatggcgggcgatatcaacgcagtgtcagaaatccgaaacagtctcgcctggcgataaccgtcttgtcggcggttgcgctgacgttgcgtcgtgatatcatcagggcagaccggttacatccccctaacaagctgtttaaagagaaatactatcatgacggacaaattgacctcccttcgtcagtacaccaccgtagtggccgacactggggacatcgcggcaatgaagctgtatcaaccgcaggatgccacaaccaacccttctctcattcttaacgcagcgcagattccggaataccgtaagttgattgatgatgctgtcgcctgggcgaaacagcagagcaacgatcgcgcgcagcagatcgtggacgcgaccgacaaactggcagtaaatattggtctggaaatcctgaaactggttccgggccgtatctcaactgaagttgatgcgcgtctttcctatgacactgaagcgtcaattgcgaaagcaaaacgcctgatcaaactctacaacgatgctggtattagcaacgatcgtattctgatcaaactggcttctacctggcagggtatccgtgctgcagaacagctggaaaaagaaggcatcaactgtaacctgaccctgctgttctccttcgctcaggctcgtgcttgtgcggaagcaggcgtgttcctgatctcgccatttgttggccgtattcttgactggtacaaagcgaatactgataagaaagagtacgctccggcagaagatccgggcgtggtttctgtatctgaaatctaccagtactacaaagagcacggttatgaaaccgtggttatgggcgcaagcttccgtaacatcggcgaaattctggaactggcaggctgcgaccgtcttaccatcgcacctacactgctgaaagagctggcggagagcgaaggggctatcgaacgtaaactgtcttacaccggcgaagtgaaagcgcgtccggcgcgtatcactgagtccgagttcctgtggcagcacaaccaggatccaatggcagtagataaactggcggaaggtatccgtaagtttgctattgaccaggaaaaactggaaaaaatgatcggcgatctgctgtaatcattcttagcgtgaccgggaagtcggtcacgctacctcttctgaagcctgtctgtcactcccttcgcagtgtatcattctgtttaacgagactgtttaaacggaaaaatcttgatgaatactttacgtattggcttagtttccatctctgatcgcgcatccagcggcgtttatcaggataaaggcatccctgcgctggaagaatggctgacatcggcgctaaccacgccgtttgaactggaaacccgcttaatccccgatgagcaggcgatcatcgagcaaacgttgtgtgagctagtggatgaaatgagttgccatctggtgctcaccacgggcggaactggcccggcgcgtcgtgacgtaacgcccgatgcgacgctggcagtagcggaccgcgagatgcctggctttggtgaacagatgcgccagataagcctgcattttgtaccaactgcgatcctttcgcgtcaggttggtgtgattcgcaaacaggcgctgatccttaacttacccggtcagccgaagtctattaaagagacgctggaaggtgtgaaggacgctgcgggtaacgttgtggtacacggtatttttgccagcgtaccgtactgcattcagttgctggaagggccatacgttgaaacggcaccggaagtggttgcagcattcagaccgaagagtgcaagacgcgacgttagcgaataaaaaaatccccccgagcggggggatctcaaaacaattagtgggattcaccaatcggcagaacggtgcgaccaaactgctcgttcagtacttcacccatcgccagatagattgcgctggcaccgcagatcagcccaatccagccggcaaagtggatgattgcggcgttaccggcaatgttaccgatcgccagcagggcaaacagcacggtcaggctaaagaaaacgaattgcagaacgcgtgcgcctttcagcgtgccgaagaacataaacagcgtaaatacgccccacagacccaggtagacaccaaggaactgtgcatttggcgcatcggtcagacccagtttcggcatcagcagaatcgcaaccagcgtcagccagaaagaaccgtaagaggtgaatgcggttaaaccgaaagtgttgccttttttgtactccagcagaccagcaaaaatttgcgcgatgccgccgtagaaaatgcccatggcaagaataataccgtccagagcgaaataacccacgttgtgcaggttaagcagaatggtggtcatgccgaagcccatcaggcccagcggtgccggattagccaacttagtgttgcccataattcctcaaaaatcatcatcgaatgaatggtgaaataatttccctgaataactgtagtgttttcagggcgcggcataataatcagccagtggggcagtgtctacgatcttttgaggggaaaatgaaaattttccccggtttccggtatcagacctgagtggcgctaaccatccggcgcaggcaggcgatttgcagtacggctggaatcgtcacgcgataggcgctgccgctgaccgctttaaccccatttagtgccgcacctacagggcctcccagccccgcgccgcgcagcaaaccatgcccaagtacgctcattgctgcgtgggtgcgtaaaatgcgggtcagttggctggaaagcaaatgcgacacgccttttgccaataatttgtctttcatcagcagcggcagcagctcttccagctcattcaccctggcatcgatcgcgtgcagaaactcctgcttatgttcctcgtccatattcttccaggtgttacgcagaaattgttccagtaactgttgctcaatctcaaacgtagacatctctttgtcggctttcagcttcaatcgttttgaaacatcgagcaaaatggcccgatacaatttaccgtgtccgcgcagtttgttggcgatactatcgccaccaaaatgctgtaattctccagcaatcagctgccagttgcggcgatgttgctcgggatgcccttccatcgatttaaacagttcgttgcgcatcagtacgctggagaggcgagttttgcctttttcattatgggtgagcaatcgggcgaaatttgccaactgttcctcactgcaatgctggagaaaatccagatctgaatcattcaggtaattaacattcattttttgtggcttctatattctggcgttagtcgtcgccgataattttcagcgtggccatatccgatgagttcaccgtatgaccggaaaaggtgatttttgagacgcagcgtttattgtcgttatcgctgttaatgttgatccagtcagtggtttgcccttcttttatttctgaaggaatattcaggctctgactggcgctacgggcggctttgaaataaaccgatgcaccgcttaactgtaaatcgccatggtcggcagagagttgtatgcgtttaacaattcggcaaacaggaagtttcaacgccagatcgttggtttcgttacgcggcattgcaatgacgccgaggattttatggtcgtttgcctgcgccgtgcagcacagcatcagactaatcgccaggctggcggaaatcgtaaaaacggatttcataaggattctcttagtggggagaggtagggggatggatacccactagtttactgctgataaagagaagattcaggtgcgtaatgttttctttttattacaattttttgatgaatgtcttggctgcgattcattctttatatgaataaaattgctgtcagtttcacgtcttgtcctgctatatcgcgaaatttctgcgcaaaagcacaaaaaatttttgcatctcccccttgatgacgtgggttacgaccccatttagtagtcaaccgcagtgagtgagtctgcaaaaaatgaaattgggcagttgaaaccagacgtttcgcccctattacagactcacaaccacatgatgaccgaatatatagtggagacgtttagatgggtaaaataattggtatcgacctgggtactaccaactcttgtgtagcgattatggatggcaccactcctcgcgtgctggagaacgccgaaggcgatcgcaccacgccttctatcattgcctatacccaggatggtgaaactctggttggtcagccggctaaacgtcaggcagtgacgaacccgcaaaacaccctgtttgcgattaaacgcctgattggccgccgcttccaggacgaagaagtacagcgtgatgtttccatcatgccgttcaaaattattgctgctgataacggcgacgcatgggtcgaagttaaaggccagaaaatggcaccgccgcagatctctgctgaagtgctgaaaaaaatgaagaaaaccgctgaagattacttgggtgaaccggtaactgaagctgttatcaccgtaccggcatactttaacgatgctcagcgtcaggcaaccaaagacgcaggccgtatcgctggtctggaagtaaaacgtatcatcaacgaaccgaccgcagctgcgctggcttacggtctggacaaaggtactggcaaccgtactatcgcggtttatgacctgggtggtggtactttcgatatttctattatcgaaatcgacgaagttgacggcgaaaaaaccttcgaagttctggctaccaacggtgatacccacctgggtggtgaagacttcgacagccgtctgatcaactacctggttgaagaattcaagaaagatcagggcattgacctgcgcaacgatccgctggcaatgcagcgcctgaaagaagcggcagaaaaagcgaaaatcgaactgtcttccgctcagcagaccgacgttaacctgccgtacatcactgcagatgcgaccggtccgaaacacatgaacatcaaagtgactcgtgcgaaactggaaagcctggttgaagatctggtaaaccgttccattgagccgctgaaagttgcactgcaggacgctggcctgtccgtatctgatatcgacgacgttatcctcgttggtggtcagactcgtatgccaatggttcagaagaaagttgctgagttctttggtaaagagccgcgtaaagacgttaacccggacgaagctgtagcaatcggtgctgctgttcagggtggtgttctgactggtgacgtgaaagacgtactgctgctggacgttaccccgctgtctctgggtatcgaaaccatgggcggtgtgatgacgacgctgatcgcgaaaaataccactatcccgaccaagcacagccaggtgttctctaccgctgaagacaaccagtctgcggtaaccatccatgtgctgcagggtgaacgtaaacgtgcggctgataacaaatctctgggtcagttcaacctggatggtatcaacccggcaccgcgcggcatgccgcagatcgaagttaccttcgatatcgatgctgacggtatcctgcacgtttccgcgaaagataaaaacagcggtaaagagcagaagatcaccatcaaggcttcttctggtctgaacgaagatgaaatccagaaaatggtacgcgacgcagaagctaacgccgaagctgaccgtaagtttgaagagctggtacagactcgcaaccagggcgaccatctgctgcacagcacccgtaagcaggttgaagaagcaggcgacaaactgccggctgacgacaaaactgctatcgagtctgcactgactgcactggaaactgctctgaaaggtgaagacaaagccgctatcgaagcgaaaatgcaggagctggcacaggtttcccagaaactgatggaaatcgcccagcagcaacatgcccagcagcagactgccggtgctgatgcttctgcaaacaacgcgaaagatgacgatgttgtcgacgctgaatttgaagaagtcaaagacaaaaaataatcgccctataaacgggtaattatactgacacgggcgaaggggaatttcctctccgcccgtgcattcatctaggggcaatttaaaaaagatggctaagcaagattattacgagattttaggcgtttccaaaacagcggaagagcgtgaaatcaaaaaggcctacaaacgcctggccatgaaataccacccggaccgtaaccagggtgacaaagaggccgaggcgaaatttaaagagatcaaggaagcttatgaagttctgaccgactcgcaaaaacgtgcggcatacgatcagtatggtcatgctgcgtttgagcaaggtggtatgggcggcggcggttttggcggcggcgcagacttcagcgatatttttggtgacgttttcggcgatatttttggcggcggacgtggtcgtcaacgtgcggcgcgcggtgctgatttacgctataacatggagctcaccctcgaagaagctgtacgtggcgtgaccaaagagatccgcattccgactctggaagagtgtgacgtttgccacggtagcggtgcaaaaccaggtacacagccgcagacctgtccgacctgtcatggttcaggtcaggtgcagatgcgtcagggattcttcgctgtacagcagacctgtccacactgtcagggccgcggtacgctgatcaaagatccgtgcaacaaatgtcatggtcatggtcgtgttgagcgcagcaaaacgctgtccgttaaaatcccggcaggggtggacactggagaccgcatccgtcttgcgggcgaaggtgaagcgggcgagcatggcgcaccggcaggcgatctgtacgttcaggttcaggttaaacagcacccgattttcgagcgtgaaggcaacaacctctattgcgaagtcccgatcaacttcgctatggcggcgctgggtggcgaaatcgaagtaccgacccttgatggtcgcgtcaaactgaaagtgcctggcgaaacccagaccggtaagcttttccgtatgcgcggtaaaggcgtcaagtctgtccgcggtggcgcacagggtgatttgctgtgccgcgttgtcgtcgaaacaccggtaggcctgaacgagaagcagaaacagctgctgcaagagctgcaagaaagcttcggtggcccaaccggtgagcacaacagcccgcgctcaaagagcttctttgatggtgtgaagaagttttttgacgacctgacccgctaacctccccaaaagcctgcccgtgggcaggcctgggtaaaaatagggtgcgttgaagatatgcgagcacctgtaaagtggcggggatcactccccgccgttgctcttactcggattcgtaagccgtgaaaacagcaacctccgtctggccagttcgggtgtgaacctcacagaggtcttttctcgttaccagcgccgccactacggcggtgatacagatgacgatcagggcgacaatcatcgccttatgctgcttcattgctctcttctccttgaccttacggtcagtaagaggcactctacatgtgttcagcatatagggggcctcgggttgatggtaaaatatcactcggggcttttctctatctgccgttcagctaatgcctgagacagacagcctcaagcacccgccgctattatatcgctctctttaacccattctgttttatcgattctaatcctgaagacgcctcgcatttttatggcgtaattttttaatgatttaattatttaactttaatttatctcttcatcgcaattattgacgacaagctggattatttttgaaatattggcctaacaaacatcgccgactgacaacaaattaattattacttttcctaattaatctctcagaaatcctcaccttaagctatgattatctgggcttagggtcactcgtgagcgcttacagccgtcaaaaactcatctcaccgctgatggcgcaaattcttcaatggatcgtaaaaaacgagttattcctacactataatctgattttaacgatgatttgtgcggggtaaaatagtaaaaacgatctattcacctgaaagagaaataaaaagtgaaacatctgcatcgattctttagcagtgatgcctcgggaggcattattcttatcattgccgctatcctggcgatgattatggccaatagcggcgcaaccagtggatggtatcacgactttctggagacgccggttcagctccgggttggttcactcgaaatcaacaaaaacatgctgttatggataaatgacgcgctgatggcggtatttttcctgttagtcggtctggaagttaaacgtgaactgatgcaaggatcgctagccagcttacgccaggccgcatttccagttatcgccgctattggtgggatgattgttccggcattactctatctggcctttaactatgccgatccgattacccgcgaagggtgggcgatcccggcggctactgacattgcctttgcacttggtgtgctggcgctgttgggaagtcgtgttccgttagcgctgaagatctttttgatggctctggctattatcgacgatcttggggccatcattatcatcgcattgttctacactaatgacttatcgatggcctctcttggcgtcgcggctgtagcaattgcggtactcgcggtattgaatctgtgtggtgtacgccgcacgggcgtctatattctggttggcgtagtgttgtggactgcggtgttgaaatcgggggttcacgcaaccctggcgggggtaattgtcggcttctttattcctttgaaagagaagcatgggcgttctccagcgaagcgactggagcatgtgttacacccgtgggtggcgtatctgattttgccgctgtttgcatttgctaatgctggcgtttcactgcaaggtgtcacgctggatggcttgacctccattctgccattggggatcatcgctggcttgctgattggcaaaccgctggggattagtctgttctgctggttggcgctgcgtttgaaactggcgcatctgcctgagggaacgacttatcagcaaattatggcggtggggatcctgtgcggtatcggttttactatgtctatctttattgccagcctggcctttggtagcgtagatccagaactgattaactgggcgaaactcggtatcctggtcggttctatctcttcggcggtaattggatacagctggttacgcgttcgtttgcgtccatcagtttgacaggacggtttaccggggagccataaacggctcccttttcattgttatcagggagagaaatgagcatgtctcatatcaattacaaccacttgtattacttctggcatgtctataaagaaggttccgtggttggcgcagcggaggcgctttatttaactccacaaaccattaccggacagattcgagcgctggaagagcgcctgcaaggcaaattatttaaacgcaagggacgtggtctcgaacccagcgagctgggagaactggtctatcgctatgccgataaaatgttcaccttaagccaggaaatgctggatattgtgaactatcgcaaagaatccaatttattgtttgacgttggtgtggctgatgcactttccaaacgcctggtcagtagcgtgctgaatgctgcagtggtagaaggcgagcccattcatcttcgctgcttcgaatccacccacgaaatgctgctggagcaattaagtcagcataaactggatatgatcatttctgactgtccgatagactctacgcagcaggaaggcctgttctccgtgagaattggcgaatgtggcgtgagtttctggtgtacaaatccaccaccagaaaaaccgttcccggcttgtctggaagaacggcgacttttgattcctgggcgacgttcaatgttagggcgcaaattgcttaactggtttaactcccagggattaaacgtagaaatcctcggcgagtttgatgatgccgcgttgatgaaagcttttggtgcgatgcacaatgcaatcttcgttgccccaacgctttatgcatatgacttttatgccgataaaactgtcgtagaaattggtcgcgtcgagaatgtgatggaagagtaccatgctattttgctgagcggatgattcagcacccggcggtacagcgaatctgcaatacggattattctgcgctttttagtccagcggcgcgttaatcggcacctccccccaaagttaaggtgggggagatagattagttgtacataaccacgattttgactcggctcattatttgcccgcttgagacattatttccatatgtacgcgggcgaataaatagaggaatctgattacttccttcatggggatgctgaaaagagtagtaattgcttttaccatactggatttcattcgtaccatcattggagagttgaaagcctatttgacccgcaccgtcctcactgttttctaactcattttttaatatgctggttcctgactcctgtatcgtcactggttcaaagtaatattcaacatcactgggttcaaaaactaattcaccttgctcgccctggatgcagtcaaatcttatatgatgaaactgataattttcattattgatacgagacagtacaaatcgtccagtgtcgatggattgatcttcaaaaccacaggtcattaaatttacctgtaaaatagtatttaaattataattaaagcggacgctattacaattagtattattccctgtacatgaactcacttcaatttcgaacaacaaaggaaaaggagttccaggaaaaatgtctgcggtgttagaactatctgatacagatgcgatagaatatggaatggtgaaatttatcgcagatagcatttcttctaaattataagatgacttccctggaagctctatttttttaccgtcagattcaaaggggaaattaataatataatgacgacttccgactttaaaccttaaagcgttctgtgttaaaaaatgaactttaatggcgttggttgtctcttgcaagtctgtacactcaatgatatttccggtgttttcaattttttcggcggttagattacctttcatactcagtggcttgagtatatatgttccacgttgttcaccgacattggtcaatgcacagggagcactttgcacaataaaagaatatagactcaaggtgattaataaaagccacttcatagtaaactccttttactggcatatatatgttttgttttcatcgataacgtgttgaaaagtaatagtacagaataagttctgttcatcattgagagcaacttttattccagtgggaatttcatctacgcgaataaaaaggcgactaccctggccaacgactccaatattattttcctggagatccagtacgtcatagccaaaggttaatggcgaaccatcgggacgcagtgcctgtatataccagggcttacgttggtcagttgtaaactgcacataagaaactgctccacggtaaggtgcaataatttgacgattgccctgcaattctgtttcactttcactgtttgctatatcaagtaccagatggttttcacgatgaggtattatcaggtcgtaaacaacctggcctttgctgtttgttcgattgtatttttgtccattaatatgtgcaccttctaacccaggcgcatccagaattgcaaatgtatcggataactggttagtgatattaataccaccgggccagacaactaatccactactaatacttccaccactttgccaggcgtttttagaatgactatagctgccatctattatggcgatgggagttctccagcttaaattcgtaccaagcgaggtatcattattttgttgttgctgattaacatatataccataatttaactgatcatgttcaccggctatgccagtaattccagtattgttggaggaatagccatctttggaaaatgaggtcgaattcgataagttaatttggtgacgtgttttggcaatatcatccccccagtagaaaggaatggagataaacagattaaaacgctcctcttctttattattttcatcataagattggctggcagagaaagtataactaatgtgttgccagttattggagtaactgagttggtaatctttagcatttccacttcgcctccagtaattccgccaaagcgcacttaatgatacatttcccagatttttagataaaggttgcatgatattggcagaaaggctattttttctgctaatatcataaaaatcgtcaaagtcactctgatgatttattttatcattttcgtaaagatggtcgctgaatgtcctgtaatcctgcgaagcataacgccaggcggccacgctaaagtgagtagccgtttgcactagatatttattataggcgacctgatagctcgtaccttcgtgtctggtatcattatttaacttactactcgatcgggcagcgtaaaaagagatggcacccagcggtgtattccaaccatttcccagagttatagcattatagttatcggataaaatcgtacccgattatgtgatcaggttgttattatttagattaatgtttaaaatttttaatttcttgatgtgaagttgatgaaagtttaatattcttaattattcccttctttataagaagagcaaggtgccattattagagtgagagagtaggatgtttcagagtatgcttcagattattttttattcctctgtagtgaattaataatcatcacagttaatttcattctgaaattacttcttttttgagattttttaattttgatgagctatgtttttcataaggaacatacactcgttgatgcttttaaggtattttctcatttctgatgatgttttgtcgtaatcgtgcataaacttattaagttctttatacacatcattatttagctttacattgtcgcgaactaaagtttgtaccaatggtatcaaaatttcgaaacgggacggtttgtcatcaatacttgccagggttttgaatactcctgtgtatctgtaacctaagtgcttattgacaagttgagtggtccatcgaccaggcataatatcttcacagagcaaattttttattctggtattagtgaatgatgctccaaatatgttgctttttttaatgaagagattattaatttctccatttgaaaagatggtgtttgataagtcgctttcaaaacataatatattggataatacacaaccaaaataatacccatatgaaaggtcgctcttttctattgttatatttgatagcaacattttatgtatattaatattaagggcagtcaaatactggatgttttgctcgttaagttcatgcatctccagagatttattatagggtaataaaagtataaattcctttacattatttccgcagtaagaaaagacaacatcaaatttattggtgattgtgttttcagttgagcagtaagctgattttttattaatcgactgggtatgcttttaaataaagataattttttacatagttgtgaatatgcaatattgctagttttaaagttctgccacattattccctggttatcatctatcgatgaggaggggattttattgcattgctcattgtatagctcagggaaaatattttttttaataagctttttgatttcctggttaagatgactttttttcttgtctattgcactgtattttgcgttttgtgacgtttcctgatgatcataaaatgactggagatttctgcaggcctcataaaatatttcaggagtatatagctgtgggtatatttcttggttgaagtttgcctttaaaaaattaacgaatttttcatggcattcttggtatatcttaatctcttcagaaagacattcgcttgttctgtcatcaaaacatccaatctaagtaatgtgatacctttgtgtttaaaaaaataaaattgaactgtatgttctatgagtttacatctataaaaatatgcatctctcagatgagtatattgaaaaaatgatgaaggactggagatggtttaggcaagttatggcttctaaaaaagtcatcaaacaaaattaagaactctgttttatactcgcaaaatacttttactaactcattttgtcttgttttatttattattacatcatctactatatttgatttataaagacaatgtggcgaagttgagataccatttgtcattatcagtccttgaagttgatgaatttttattaatttaatttatgagtgaatgtgactactatcaaaaatagctcattaattttatgaagtagaatatnnnnnggnnnnnnnnnnntgttgattgttgttaattatttacaagatctaataaggagatatttatgaatggttaaagtgtataggaatttaattcaaaaatagagtggtcttaagtttaatacctcaatgtgtatcacaatatccacattctttgtaggggagtctggagattgagtagatattcttgttcagaatgtatcagccgatggttctacgattcttaagccacgaagagttcagaaagtgtaacggcatgtctgcaaaagccagcatcttttgactatctggcaaccggtagtgtgttctctcacgcatcataaaagcagcaggcataaaaaaacccgcttgcgcgggctttttcacaaagcttcagcaaattggcgattaagccagtttgttgatctgtgcagtcaggttagccttatgacgtgcagctttgtttttgtggatcagacctttagcagcctgacggtccacgatcggttgcatttcgttaaatgctttctgtgcagcagctttgtcgccagcttcgatagctgcgtatactttcttgatgaaagtacgcatcatagagcgacggcttgcgttgtgcttacgagccttttcagactgaatggcgcgcttcttagctgatttgatattagccaaggtccaactcccaaatgtgttctatatggacaattcaaaggccgaggaatatgcccttttagccttcttttgtcaatggatttgtgcaaataagcgccgttaatgtgccggcactcgttacgtagtgatggcgcaggattctaccagcttgcggggtgtgaatacagcttttccgcgataaaaattgcagcaggcggtcactttcttcccgtgatttgcgccatggcaatgaaaagccacttctttctgatttcggtactcaatcgccggttaaccttgaccgctgtacaaggtatactcggacgattttcactgttttgagccagacatgaagctgatacgcggcatacataatctcagccaggccccgcaagaagggtgtgtgctgactattggtaatttcgacggcgtgcatcgcggtcatcgcgcgctgttacagggcttgcaggaagaagggcgcaagcgcaacttaccggtgatggtgatgctttttgaacctcaaccactggaactgtttgctaccgataaagccccggcacggctgacccggctgcgggaaaaactgcgttaccttgcagagtgtggcgttgattacgtgctgtgcgtgcgtttcgacaggcgtttcgcggcgttaaccgcgcaaaatttcatcagcgatcttctggtgaagcatttgcgcgtaaaatttcttgccgtaggtgatgatttccgctttggcgctggtcgtgaaggcgatttcttgttattacagaaagctggcatggaatacggcttcgatatcaccagtacgcaaactttttgcgaaggtggcgtgcgtatcagcagcaccgctgtgcgtcaggcgctggcggatgacaatctggctctggcagaaagtttactggggcacccgtttgccatctccgggcgtgtagtccacggtgatgaattagggcgcactataggtttcccgacggcgaatgtaccgctacgccgtcaggtttccccggtgaaaggggtttatgcggtagaagtgctgggcctcggtgaaaagccgttacccggcgtggcaaacattggaacacgcccaacggttgccggtattcgccagcagctggaagtgcatttgttagatgttgcaatggacctttacggtcgccatatacaagtagtgctgcgtaaaaaaatacgcaatgagcagcgatttgcgtcgctggacgaactgaaagcgcagattgcgcgtgatgaattaaccgcccgcgaattttttgggctaacaaaaccggcttaagcctgttatgtaatcaaaccgaaacacggaaccgagaatctgatgagtgactataaatcaaccctgaatttgccggaaacagggttcccgatgcgtggcgatctcgccaagcgcgaaccgggaatgctggcgcgttggactgatgatgatctgtacggcatcatccgtgcggctaaaaaaggcaaaaaaaccttcattctgcatgatggccctccttatgcgaatggcagcattcatattggtcactcggttaacaagattctgaaagacattatcgtgaagtccaaagggctttccggttatgactcgccgtatgtgcctggctgrgactgccacggtctgccgatcgagctgaaagtagagcaagaatacggtaagccgggtgagaaattcaccgccgccgagttccgcgccaagtgccgcgaatacgcggcgacccaggttgacggtcaacgcaaagactttatccgtctgggcgtgctgggcgactggtcgcacccgtacctgaccatggacttcaaaactgaagccaacatcatccgcgcgctgggcaaaatcatcggcaacggtcacctgcacaaaggcgcgaagccagttcactggtgcgttgactgccgttctgcgctggcggaagcggaagttgagtattacgacaaaacttctccgtccatcgacgttgcttttcaggcggtcgatcaggatgcactgaaagcaaaatttgccgtaagcaacgttaacggcccaatctcgctggtgatctggaccactacgccgtggactctgcctgcgaaccgcgcaatctctattgcacctgatttcgactatgcgctggtgcagatcgacggtcaggccgtgattctggcgaaagatctggttgaaagcgtaatgcagcgtatcggcgtgaccgattacaccattctcggcacggtaaaaggtgcggagcttgagttgctgcgctttacccatccgtttatgggcttcgacgttccggcaatcctcggcgatcacgttaccctggatgccggtaccggtgccgttcacaccgcgcctggccacggcccggacgactatgtgatcggtcagaaatacggcctggaaaccgctaacccggttggcccggacggcacttatctgccgggcacttatccgacgctggatggcgtgaacgtcttcaaagcgaacgacatcgtcgttgcgctgctgcaggaaaaaggcgcgctgctgcacgttgagaaaatgcagcacagctatccgtgctgctggcgtcacaaaacgccgatcatcttccgcgcgacgccgcagtggttcgtcagcatggatcagaaaggtctgcgtgcgcagtcactgaaagagatcaaaggcgtgcagtggatcccggactggggccaggcgcgtatcgagtcgatggttgctaaccgtcctgactggtgtatctcccgtcagcgcacctggggcgtaccgatgtcactgttcgtgcacaaagacacggaagagctgcatccgcgtactctcgaactaatggaagaagtggcaaaacgcgttgaagttgacggcatccaggcgtggtgggatcttgatgcgaaagagatcctcggcgatgaagctgatcagtacgtgaaagtgccggacacattggatgtatggtttgactccggatctacccactcttctgttgttgacgtgcgtccggaatttgccggtcacgcagcggacatgtatctggaaggttctgaccagcaccgtggttggttcatgtcttccctaatgatctccaccgcgatgaaaggcaaagcgccgtatcgtcaggtactgacccacggctttaccgtggatggtcagggtcgcaagatgtctaaatccatcggcaataccgtttcgccgcaggatgtgatgaacaaactgggcgcggatattctgcgtctgtgggtggcatcaaccgactacaccggtgaaatggccgtttctgacgagatcctgaaacgtgctgccgatagctatcgtcgtatccgtaacaccgcgcgcttcctgctggcaaacctgaacggttttgatccagcaaaagatatggtgaaaccggaagagatggtggtactggatcgctgggccgtaggttgtgcgaaagcggcacaggaagacatcctcaaggcgtacgaagcatacgatttccacgaagtggtacagcgtctgatgcgcttctgctccgttgagatgggttccttctacctcgacatcatcaaagaccgtcagtacaccgccaaagcggacagtgtggcgcgtcgtagctgccagactgcgctgtatcacatcgcagaagcgctggtgcgctggatggcaccaatcctctccttcaccgctgatgaagtgtggggctacctgccgggcgaacgtgaaaaatacgtcttcaccggtgagtggtacgaaggcctgtttggcctggcagacagtgaagcgatgaacgatgcgttctgggacgagctgttgaaagtgcgtggcgaagtgaacaaagtcattgagcaagcgcgtgccgacaagaaagtgggtggctcgctggaagcggcagtaaccttgtatgcagaaccggaactgtcggcgaaactgaccgcgctgggcgatgaattacgatttgtcctgttgacctccggcgctaccgttgcagactataacgacgcacctgctgatgctcagcagagcgaagtactcaaagggctgaaagtcgcgttgagtaaagccgaaggtgagaagtgcccacgctgctggcactacacccaggatgtcggcaaggtggcggaacacgcagaaatctgcggccgctgtgtcagcaacgtcgccggtgacggtgaaaaacgtaagtttgcctgatgagtcaatcgatctgttcaacagggctacgctggctgtggctggtggtagtcgtgctgattatcgatctgggcagcaaatacctgatcctccagaactttgctctgggggatacggtcccgctgttcccgtcgcttaatctgcattatgcgcgtaactatggcgcggcgtttagtttccttgccgatagcggcggctggcagcgttggttctttgccggtattgcgattggtattagcgtgatcctggcagtgatgatgtatcgctcgaaggccacgcagaagctaaacaatatcgcttatgcgctgattattggcggcgcgctgggcaacctgttcgaccgcctgtggcacggcttcgttgtcgatatgatcgacttctacgtcggcgactggcacttcgccaccttcaaccttgccgatactgccatttgtgtcggtgcggcactgattgtgctggaaggtttttgccttctaaagcgaaaaaacaataataaaccctgccggataaggcctacagattgctgcgaaatcgtaggccgcatccggcaaaaatcctcaaaatataagagcaaacctgcatgtctgaatctgtacagagcaatagcgccgtcctggtgcacttcacgctaaaactcgacgatggcaccaccgccgagtctacccgcaacaacggtaaaccggcgctgttccgcctgggtgatgcttctctttctgaagggctggagcaacacctgttggggctgaaagtgggcgataaaaccaccttctcgttggagccagatgcggcgtttggcgtgccgtcaccggacctgattcagtacttctcccgccgtgaatttatggatgcaggcgagccagaaattggcgcaatcatgctttttaccgcaatggatggcagtgagatgcctggcgtgatccgcgaaattaacggcgactccattaccgttgatttcaaccatccgctggccgggcagaccgttcattttgatattgaagtgctggaaatcgatccggcactggaggcgtaacatgcagatcctgttggccaacccgcgtggtttttgtgccggggtagaccgcgctatcagcattgttgaaaacgcgctggccatttacggcgcaccgatatatgtccgtcacgaagtggtacataaccgctatgtggtcgatagcttgcgtgagcgtggggctatctttattgagcagattagcgaagtaccggacggcgcgatcctgattttctccgcacacggtgtttctcaggcggtacgtaacgaagcaaaaagtcgcgatttgacggtatttgacgcgacctgtccgctggtgaccaaagtgcatatggaagtcgcccgcgccagtcgccgtggcgaagaatctattctcatcggtcacgccgggcacccggaagtggaagggacaatgggccagtacagtaacccggaagggggaatgtatctggtcgaatcgccggacgatgtgtggaaactgacggtcaaaaacgaagagaagctctcctttatgacccagaccacgctgtcggtggatgacacgtctgatgtgatcgacgcgctgcgtaaacgcttcccgaaaattgtcggtccgcgcaaagatgacatctgctacgccacgactaaccgtcaggaagcggtacgcgccctggcagaacaggcggaagttgtgttggtggtcggttcgaaaaactcctccaactccaaccgtctggcggagctggcccagcgtatgggcaaacgcgcgtttttgattgacgatgcgaaagacatccaggaagagtgggtgaaagaggttaaatgcgtcggcgtgactgcgggcgcatcggctccggatattctggtgcagaatgtggtggcacgtttgcagcagctgggcggtggtgaagccattccgctggaaggccgtgaagaaaacattgttttcgaagtgccgaaagagctgcgtgtcgatattcgtgaagtcgattaagtcattagcagcctaagttatgcgaaaatgccggtcttgttaccggcattttttatggagaaaacatgcgtttacctatcttcctcgatactgaccccggcattgacgatgccgtcgccattgccgccgcgatttttgcccccgaactcgacctgcaactgatgaccaccgtcgcgggtaatgtctcggttgagaaaactacccgtaatgccttgcaactgctgcatttctggaatgcggagattccgctcgcccaaggggccgctgtgccgctggtacgcgcaccgcgtgatgcggcatctgtgcacggcgaatcgggaatggctggctacgactttgttgagcacaaccgaaagccgctcgggataccggcgtttctggcgattcgggatgccctgatgcgtgcaccagagcctgttaccctggtggccatcggcccgttaaccaatattgcgctgttactttcacaatgcccggaatgcaagccgtatattcgccgtctggtgatcatggggggttctgccggacgcggcaactgtacgccaaacgccgagtttaatattgctgccgatccagaagctgctgcctgtgtcttccgcagtggtattgaaatcgtcatgtgcggtctggatgtcaccaatcaggcaatattaactcctgactatctctctacactgccgcagttaaaccgtaccgggaaaatgcttcacgccctgtttagccactaccgtagcggcagtatgcaaagcggcttgcgaatgcacgatctctgcgccatcgcctggctggtgcgcccggacctgttcactctcaaaccctgttttgtggcagtggaaactcagggcgaatttacctcaggcacgacggtggttgatatcgacggttgcctgggcaagccagccaatgtacaggtggcattggatctggatgtgaaaggcttccagcagtgggtggctgaggtgctggctctggcgtcgtaacctgtcacatgttattggcatgcagtcattcatcgactcatgcctttcactgatatccctccctgtttatcattaatttctaattatcagcgtttttggctggcggcgtagcgatgcgctggttactctgaaaacggtctatgcaaattaacaaaagagaatagctatgcatgatgcaaacatccgcgttgccatcgcgggagccggggggcgtatgggccgccagttgattcaggcggcgctggcattagaaggcgtgcagctgggcgcggcgctggagcgcgaaggatcttctttactgggcagcgacgccggtgagctggctggtgcagggaaaacaggcgttaccgtgcaaagcagcctcgatgcggtaaaagatgattttgatgtgtttatcgattttacccgtccggaaggtacgctgaaccatctcgcttttgtcgccagcatggcaaagggatggtgatcggcactacggggtttgacgaagccggtaaacaggcgattcgtgacgccgccgccgatattgcgattgtctttgccgccaattttagcgttggcgttaacgtcatgcttaagctgctggagaaagcagccaaagtgatgggtgactacaccgatatcgaaattattgaagcacatcatagacataaagttgatgcgccgtcaggcaccgcactggcaatgggagaggcgatcgcccacgcccttgataaagatctgaaagattgcgcggtctacagtcgtgaaggccacaccggtgaacgtgtgcctggcaccattggttttgccaccgtgcgtgcaggtgacatcgttggcgaacataccgcgatgtttgccgatattggcgagcgtctggagatcacccataaggcgtccagccgcatgacatttgctaacggcgcggtaagatcggctttgtggttgagtggtaaggaaagtggtctttttgatatgcgagatgtgcttgatctcaatagtttgtaaccacaaaatatttgttatggtgcaaaaataacacatttaatttattgattgtaaagggctttaatttttggcccttttatttttagttttatgtttttaaatattctataagtgccaaaaattacatgttttgtcttctgtttttgttgttttaatgtaaattttgaccatttggtccactttttcctgctcgtttttatttcatgcaatcttcttgctgcgcaagcgttttccagaacaggttatatgatctttttgtcgcttaatgcctgtaaaacatgcatgagccacaaaataatataaaaaataccgccattaagttgacttttagcgcccatatctccagaatgccgccgtttgccagaaattcgtcggtaagcagatttgcattgatttacgtcatcattgtgaattaatatgcaaataaagtgagtgaatattctctggagggtgttttgattaagtcagcgctattggttctggaagacggaacccagtttcacggtcgggccataggggcaacaggttcggcggttggggaagtcgttttcaatacttcaatgaccggttatcaagaaatcctcactgatccttcctattctcgtcaaatcgttactcttacttatccccatattggcaatgtcggcactaatgacgccgatgaagaatcttctcaggtacatgcacaaggtctggtgattcgcgacctgccgctgattgccagcaacttccgtaataccgaagacctctcttcttacctgaagcgccataacatcgtggcgattgccgatatcgatacccgtaagctgacgcgtttactgcgcgagaaaggcgcacagaatggctgcattatcgcaggcgataacccggatgcggcgttggcgttagaaaaagcccgcgcgttcccaggtctgaatggcatggatctggcaaaagaagtgaccaccgcagaagcctatagctggacacaagggagctggacgttgaccggcggcctgccagaagcgaaaaaagaagacgagctgccgttccacgtcgtggcttatgattttggtgccaagcgcaacatcctgcggatgctggtggatagaggctgtcgcctgaccatcgttccggcgcaaacttctgcggaagatgtgctgaaaatgaatccagacggcatcttcctctccaacggtcctggcgacccggccccgtgcgattacgccattaccgccatccagaaattcctcgaaaccgatattccggtattcggcatctgcctcggtcatcagctgctggcgctggcgagcggtgcgaagactgtcaaaatgaaatttggtcaccacggcggcaaccatccggttaaagatgtggagaaaaacgtggtgatgatcaccgcccagaaccacggttttgcggtggatgaagcaacattacctgcaaacctgcgtgtcacgcataaatccctgttcgacggtacgttacagggcattcatcgcactgataaaccggcgttcagcttccagggtcacccggaagccagccctgggccacacgacgcagcgccgttgttcgaccactttatcgagttaattgagcagtaccgtaaaaccgctaagtaatcaggagtaaaagagccatgccaaaacgtacagatataaaaagtatcctgattctgggtgcgggcccgattgttatcggtcaggcgtgtgagtttgactactctggcgcgcaagcatgtaaagccctgcgcgaagagggttaccgcgtcattctggtgaactccaacccggcgaccatcatgaccgacccggaaatggccgatgcgacctacatcgagccgattcactgggaagtagtacgcaagattattgaaaaagagcgcccggacgcggtgctgccaacgatgggcggtcagacggcgctgaactgcgcgctggagctggagcgtcagggcgtgttggaagagttcggcgtgactatgattggtgcgaccgccgatgcgattgataaagcagaagaccgccgtcgtttcgacgtagcgatgaagaaaattggtctggaaaccgcgcgttccggtatcgcacacacgatggaagaagcgctggcggttgccgctgacgtgggcttcccgtgcattattcgcccatcctttaccatgggcggtagcggcggcggtatcgcttataaccgcgaagagtttgaagaaatttgcgcccgcggtctggatctctccccaaccaaagagctgctgattgatgagtcgctgatcggctggaaagagtacgagatggaagtggtgcgtgataaaaacgacaactgcatcatcgtctgctctatcgaaaactttgatgcgatgggcatccataccggtgactccatcactgtcgcgccagcccaaacgctgaccgacaaagaatatcaaatcatgcgtaacgcctcgatggcggtgctgcgtgaaatcggcgttgaaaccggtggttccaatgtccagtttgcggtgaacccgaaaaacggtcgcctgattgttatcgaaatgaacccgcgcgtgtcccgttcttcggcgctggcgtcgaaagcgaccggtttcccgattgctaaagtggcggcgaaactggcggtgggttacaccctcgacgaactgatgaacgacatcactggcggacgtactccggcctccttcgagccgtccatcgactatgtggttactaaaattcctcgcttcaacttcgaaaaattcgctggtgctaacgaccgtctgaccactcagatgaaatcggttggcgaagtgatggcgattggtcgcacgcagcaggaatccctgcaaaaagcgctgcgcggcctggaagtcggtgcgactggattcgacccgaaagtgagcctcgatgacccggaagcgttaaccaaaatccgtcgcgaactgaaagatgctggcgcagagcgtatctggtacatcgccgatgccttccgtgcgggcctgtctgtggacggcgtgttcaacctgaccaatattgaccgctggttcctggtacagattgaagaactggtgcgtctggaagagaaagtagcggaagtgggcatcactggcctgaacgctgaattcctgcgccagctgaaacgcaaaggctttgccgatgcgcgtctggcaaaactggcgggcgtgcgcgaagcggaaatccgcaagctgcgcgaccagtatgacctgcacccggtttataagcgcgtggatacctgtgcggcagagttcgccaccgacaccgcttacatgtactccacttatgaagaagagtgcgaagcgaatccgtctaccgaccgtgaaaaaatcatggttctcggcggcggcccgaaccgtatcggtcagggtatcgaattcgactactgctgtgtacacgcctcgctggcgctgcgcgaagacggttacgaaaccattatggttaactgtaacccggaaaccgtctccaccgactacgacacttccgatcgcctctacttcgagccggtaactctggaagatgtgctagaaatcgtgcgtattgagaagccgaaaggcgttatcgttcagtacggcggtcagaccccgctgaaactggcgcgcgcgctggaagctgctggcgtaccggttatcggcaccagcccggatgctatcgaccgtgcagaagaccgtgaacgcttccagcatgcggttgagcgtctgaaactgaaacaaccggcgaacgccaccgttaccgctattgaaatggcggtagagaaggcgaaagagattggctacccgctggtggtacgtccgtcttacgttctcggcggtcgggcgatggaaatcgtctatgacgaagctgacctgcgtcgctacttccagacggcggtcagcgtgtctaacgatgcgccagtgttgctggatcacttccttgatgacgcggtagaagttgacgtggatgccatctgcgacggcgaaatggtgctgattggcggcatcatggagcacatcgagcaggcgggcgtgcactccggtgactccgcatgttctctgccagcctacaccttaagtcaggaaattcaggatgtgatgcgccagcaggtgcagaaactggccttcgaattgcaggtgcgcggtctgatgaacgtgcagtttgcggtgaaaaacaacgaagtctacctgattgaagttaacccgcgtgcggcgcgtaccgttccgttcgtctccaaagccaccggcgttccgctggcaaaagtggcggcgcgtgtgatggctggcaaatcgctggctgagcagggcgtaaccaaagaagttatcccgccgtactactcggtgaaagaagtggtgctgccgttcaataaattcccgggtgttgacccgctgttagggccagaaatgcgctctaccggggaagtcatgggcgtgggccgcaccttcgctgaagcgtttgccaaagcgcagctgggcagcaactccaccatgaagaaacacggtcgtgcgttgctttccgtgcgcgaaggcgataaagaacgcgtggtggacctggcggcaaaactgctgaaacagggcttcgagctggatgcgacccacggcacggcgattgtgctgggcgaagcgggcattaatccgcgtctggtgaacaaggtgcatgaaggccgtccgcacattcaggaccgcatcaagaatggcgaatatacctacatcatcaacaccacttcaggccgtcgcgcgattgaagactcccgcgtgatccgtcgcagtgcgctgcaatataaagtgcattatgacaccaccctgaacggtggtttcgctaccgcgatggcgctgaatgccgacgcgaccgaaaaagtaatttcggtgcaggaaatgcacgcgcagatcaaataatagcgtgtcatggcggatatttttcatccgctaatttgatcgaataagtaatacggttctctgatgaggaccgttttttttgcccattaagtaaatcttttggggaatcgatatttttgatgacataagcaggatttagctcacacttatcgacggtgaagttgcatactatcgatatatccacaattttaatatggccttgtttaattgcttcaaaacgagtcatagccagacttttaatttgtgaaactggagttcgtatgtgtgaaggatatgttgaaaaaccactctacttgttaatcgccgaatggatgatggctgaaaatcggtgggtgatagcaagagagatctctattcatttcgatattgaacacagcaaggcggttaataccctgacttatattctgtcggaagtcgcagaaataagctgcgaagttaagatgatccctaataagctggaaggacggggatgccagtgccagcgactggtaaaagtggtcgatatcgatgagcaaatttacgcgcgcctgcgcaataacagccgggataaattagtcggcgtaagaaagacgccgcgtattcctgccgttccgctcacggaacttaaccgcgagcagaagtggcagatgatgttgtcaaagagtatgcgtcgttaattttatctcgttgataccgggcgtcctgcttgccagatgcgatgttgtagcatcttatccagcaaccaggtcgcatccggcaagatcaccgtttaggcgtcacatccgtcgtcccctgcaaacgggggcgattttcctccatttgcctcagtggctgtgtttcatgtaacgatgcatgacagcgcccgacaagatcctgatactctttggtattcaaccgtttccagtgtaactcgtcgtcactaacactgcgtacagcgcgggctggcgtacccatcaacaactggcgtttctcgccgtgaaagcctgctttgacaaagctcatggcggcaacaatgctctcttcgccaatgaccgcgccatccataatcacgctgttcatcccgaccaatgcatcgcgaccaatcacacaaccatgcaggatcgctccgtgcccgatatggccgttttccccaacgatggtgtcagtgtcgcagtagccatgcataatgcagccatcctgaatattggctcccgcttgcacgatcaaccgcccgtagtcaccacgcagtgaggcgagtgggccgatgtagacaccggctcccacaatcacatcgccaatcaagacggcactgggatggacaaacgccgtcgggtgaaccaccggaattaacccctcaaaggcgtaatagctcacggttgttaacgtcctttccacaccggatcgcgcttctcggcaaacgccagcggcccttcaatggcatcctccgaatgcagaaccgacggatagtgtttcaacacgccgctgcgaatatagcgatacgcttcttctaccggcatttcgctggtggtgcggaagatctctttcagcgccgcaatcgccagcggggcgctgttaaccagctgctgcgccagttcgcgggcgttatccatcagttccgcctggctaaccacgcggttgactatcccccaacgcagcgcctcttctgcgcccattcgtctgccggtcatcaccatttcattgacgatggcaggcggcaggatcttcggtagacgcagcacgccgccgctgtcaggaacgatgcccagcttggcttccggcagggcgaagctggcgttatcggcacaaacaataaaatctgccgccagcgccagttcgaaaccgccgccaaaggcatagccgttcacagctgcgataaccggtttgtcgagattgaaaatttcggttaatcccgcaaatccacccgggccaaagtcagcatccggtgcttcgccttctgctgccgcttttaaatcccagcccgcggaaaagaacttctctccggcaccggtaataatggcgacacgtaattgcggatcgtcacggaaatttagaaatacttcgcccatttcaaagctggtttttgcatcaatagcattcgcttttggacgatcaagggtaatttccagaattgatccattgcgggtcagatgtaatgattcactcattccttttctccatttttgctttttcagggacgacaacatccctgcaaaaaatgcatattgttttatagcgtgattattagctggcagggtagttccctgctgtttcatttatttcagattctttctaattattttccccgagcaattacgtggcagatcttttctgatctccagataagagggcactttaaatttcgccatattttgttcgcagaagcggaaaaattcctcttcgctcaatgtttcaccttcattcagcaccacaaatgctttgatggcttcatcgcgaatcgaatctttaatacccacaaccacgatatcctgaatttttggatgggtggcgatgatattttccagctccacgcaggagacattctcgccaccgcgtttgatcatattgcagcggcgatcgacgaaataaaaaaagccctcttcgtcgcagtatccggtatcgccggtatgtagccagccgtcggcttccagcactttcgcagtggctttcgggttgagaaaatactctttgaagatggttttccctggtacgcctttaatacagatttcaccgatctcacctgccgggagcgggcgattgtgatcgtcgcggatctccgcttcgtagcaaaaccccgcccgaccaatcgacggccagcgtcgtttatcgctagggcgatcgccgataatgcccacaatggtttccgtcatcccataagacgtcagcaagcgaacgccgaagcgttcacaaaacgcatctttttcctgctccgacaagttgagataaaacatcacttcccgcaggcggtgttgccgatcgttcgctgaaggcggctgcaccatcaacgtacggatcatcatcggaatacattcggtaatggtggcgcggtacttctgcacctgtccccagaaggcgcgggcgctgtatttctcgaccagcacaaaggtggccccggcagaaaacgccgccatcgccgcagtacactggcaatcgatatgaaacgcaggcattaccgtcaggtagacgtcatcgtcacgcagtgcacactgccaggcggagtaatatccagcgaagcgcaggttgtaatgggtaatcaccacacctttcggtcgggaggtggtgccggaggtgaagagaatttccgccgtatcgtcagtcgatagcggcggtgcatagcacaaggtggcaggttgttgatttttcagttgagtaaacgaactcacgccatcatcagcgggaagtgccacatctgtcaggcaaatgtgccgcaattgagtggcatcttcctgctgaatctgttgatacataggatagaattgcgcactggtcaccagcaggcacgcctggctattttgcaggatccacgcgctttcctcgcgcaacaggcgggcgttaatcggcaccataatcgcgccaatttttgccagcccgaaccagcaaaagataaattccgggcagttgtcgagatgtagagcaaccttgtcgcctttgcgaatccctagcgtataaaacaggtttgccgtgcggttaatctcctgatttaactcaagataactataccggttaacgactccgccgctggattcacaaatcagcgccgttttatgaccgtaaacgtccgcaagatcgtcccacatttgacgtagatgttgtccgccaatgatatccattgcacctctatccatttttgttcgtttgttattgggcgggcgctagtcaggcaagccgactgacgccacgcgtttagtcctcaactttggccagacctttgctgaccaactcctgaatgtcgttttcgctgtagccgatatttttcaaaatggcagccgtgtccatgccatgtgagggcattccgcgccagatttgtccggggttatttttgaatttcggcatgatgttcggccctttgcaggtgcgaccatccatcgtttgccactgagtgattgattcacgggcaacatactgtggattgctttccagttccggtacggtcagtactttggcacaggcgatattcagttcggcaaagcgttctttaacttctgcgatggtatgtgccgccagccaggcatcgagtttttcttctaccagtgggccgtaagggcattcgatacggtggataagctgagtgccttccgggatttccggcgtaccgagtagatgtgcgaggccaatatctttaaagcactcttcaatttgggtaatgcccaccagttccatcacgatgtagccgtcggcgcatttatacagaccgcaaccggcgtagtagggatctttacctttgctcatgcgcgggcacatttcgccgccgttgaagtaatccatcatgaagtactggcccatacgcagcatcacttcatacatggcgatgtcgatactttcgcctttaccggtttcacgcactttatgcagtgctgccagcgccgccgtggtggcggtcaggccagaaaagtaatcggcggtatacgggaaggcaggcattggctggtcaacatcaccgttctgaatcaggtaaccactgaaggcctgggcgatggtgttataggccggaagattggtgtactcctcggtgccgtactgaccaaaaccggacaggtgagcgataaccagtttcgggttgtgctgccacagtacttcatcggtaatgccacgacgggcaaaggccggacctttactggcttcgatgaagatatcggtggtttccattaatttcagaaacgcttcgcggccttcatctttgaaaatatttaacgacagcgcgtgcaaattgcggcgggagagctgcgggtagttcggttgaacgcgaatggtgtcggcccaggcgacgttctcgatccagataacttccgcaccccattctgcgaacatttgcccggcgaacggcccggcgatttcgataccggagaagacaacgcgcaatccggccaacggcccgaatttcggcatggtagatgatccattattagctcctgaaaaatttatgtagcgcatgactgccggatgcggcgtaaacgctttatccggcctacattcgtgctcccgtaggcctgataagacgcattagcgtcgcatcaggcagcgcacggacttagcggtattgcttcagcaccgcgcgacccagcgtcaggatctgcatttcgtcagatcccccggagacgcggtctacacgcaggtcacgccagaagcggctgatgcggtggttgcccgcaatcccgacaccgcccagcacctgcattgcgctatccacaacttcaaatgccgcattggcgcagaagtatttgcacatcgctgcatcgccagaggtgatggtgccgttgtctgctttccacgctgcttcatacagcatgtttttcatggagtttaatttgatcgccatgtgggcgaatttttcctgaatcaactggaaacgaccaatagcctcgccaaactgcacgcgctgattggcgtagcgcgccgcatcttcaaaggcgcacatcgccgtaccgtagttggtgagggctaccaggaaacgttcatggtcgaactcttctttgacgcggttaaagccgttaccttcccgaccgaacatgtctttctcgtccagttccacgtcgtcaaaggtgatttcacagcagctatccatacgcagaccgagcttttcaagtttggtcactttgatgcccggtttgctcatatcaacaaaccattcggtgtagacaggtttgtccggagaagccccgtcgcgcgccatcaccacgatgtacggggtgtaggcgctgctggtaataaaacacttactaccattaagataaatcttaccatttctacgggtataagtcgttttcaggctacccacgtcggagcccgcgcccggttcggtaatcgctgagttccacatctgcttaccggtgccgcggaaagccataatcttgtcgatctgctcttgtgtgccttcgcgcaggaaggtgttgaacccgcccggcaactggtacagtacataggttggtgcccccagacgtcccagctccatccacacggcggcgagagtaacaaaccccgcgtccagaccaccgtgctcttcagggatcagcagactgtcgatacccatatccgccagtgctttgacaaaacgttccgggtagacgctgtcacggtcgcactcggcaaaataggcctcccagttttcgctggccatcagttcgcggataccggcgacaaacagttcctgctcatcatttaaattaaaatccatctttcaacctcttgatattttgggggttaattaatctttccagttctgtttcgcgtctttaataaaggagagcgtcaccataatgttgacgaagaacagcgggcatcctccggcgataatggcagtttgaatcggtttcaggccgccgagcgccagcaaaacaataccgataatgccaaccagaattgaccaaccgatacgcaccagcagcggtggttcttcaccatcgcgtacttcgcggcaagtggacatcgccagggtataagagcaggcgttaaccagcgtaacggtggcaataaagcagaggatgaagaagccccacatggtggcggtgctgagtggcagagcggcccaggtttcaatgatggcgcgcgccacaccgtactgttcgatcagatttggaatgttgataatgtttttatctatcaacagcagagtgttactaccgagtacagtccacaggatccaggttgacgctgtcagccccagcaccatgccgaagcacagttcacgcacagtacgaccacgggagatgcgggcgaggaagatactcatctggatagcataaatcacccaccatgcccagtagaacacggtccagccctgcgggaagccgcctttagcgatgggatcggtatagaacaacatgcgcggcagatacatcagcaacatccccaccgaatcggtgaagtagttcatgatgaagctggcaccgctgacaatgaacacccaacccagcatcaggaagctcaggtaactacgcacgtcactggcgatacgtacccctttttgcagaccgcaagcgacgcaaatggcgttgaggataatccagcaggtaatgatgatagcgtccagttgcagggtatgcggaatgccaaacaaccattgcatacactcggtcaccagcggcgtggcaaggcccagactggtacccatcgcgaagatcaaggcgacgagatagaagttgtcgacgatagtgccgaacaaccctttggcgtgtttttcacctaccagcggcaccagtgtcgagctggggcgaatcacttccattttgcggacaaagaagaagtaagcgaaggcgactgaaaggaagctgtaagtggcccacggcagaggtccccagtggaacaagctgtaagccagccccaactctttcgcccctgtcgagttcggttctaagccaaacggcggggtggagatgtagtagtagatctcaatcgatccccagaacagtacggcagcagacgtacaggaggcgaacatcataaagatccaactggcggtactaaattcaggtggttcgttacctaaacgctttttggcatacgggccaaacaccagccagaaccaaccgaaaagcatcaccaccatataccattcaaatgcccatccccatacattggtgacgtaactgaatacagcattaataacgacattcgctgcatccagatctctgactgtaagccaacaaagtatgccgacgattattaacggcggaaagaaaaccttcggttctattcccgtttttctcttttcattcttcatgagttaattccactgtgaaaacgaatatttattttgcgttcccgtttgttttatttttgttaacatttgatataattattattaacctcgtggacgcgttaatggctaactcataatgggtattcaataagctgcattctgtgattgttatcacatttttgtttcgggtgaatagagggcgattttctcgttaattttgattattaatcagtttgttatgttgtgttgtgagtaaaaaaatagcatctgactttcaatattggtgatccataaagcaatattgaaaatttcttttttctacgccatgttttcaatattggtgaggaacttaacaatattgaaagttggatttatctgcgtgtgacattttcaatattggtgattaaagttttatttccaaattaaagggcgtgatatctgtaattaacaccaccgatatgaacgacgtttccttcatgatttctggagatgcaatgaagattattacttgctataagtgcgtgcctgatgaacaggatattgcggtcaataatgctgatggttcattagacttcagcaaagccgatgccaaaataagccaatacgatctgaacgctattgaagcggcttgccagctaaagcaacaggcagcagaggcgcaggtgacggccttaagtgtgggcggtaaagccctgaccaacgccaaagggcgtaaagatgtgctatcgcgcggcccggatgaactgattgtggtgattgatgaccagttcgagcaggcactgccgcaacaaacggcgagcgcactggctgcagccgcccagaaagcaggctttgatttgatcctctgtggcgatggttcttccgacctttatgcccagcaggttggtctgctggtgggcgaaatcctcaatattccggcagttaacggcgtcagcaaaattatctccctgacggcagataccctcaccgttgagcgcgaactggaagatgaaaccgaaaccttaagcattccgctgcctgcggttgttgctgtttccactgatatcaactccccacaaattccttcgatgaaagccattctcggcgcggcgaaaaagccagtccaggtatggtcggcggcggatatcggttttaacgccgtggacgcctggtctgaacaacaggttgctgcgccgaaacagcgcgaacgtcagcgcatcgtgattgaaggcgacggcgaagaacagatcgccgcatttgctgaaaatcttcgcaaagtcatttaattacaggggatgctatgaacacgttttctcaagtctgggtattcagcgataccccttctcgtctgccggaactgatgaacggtgcgcaggctttagctaatcaaatcaacacctttgtcctcaatgatgccgacggcgtacaggcaatccagctcggcgctaatcatgtctggaaattaaacggcaaaccggacgatcggatgatcgaagattacgccggtgtcatggctgacactattcgccagcacggcgcagacggcctggtgctgctgccaaacacccgtcgcggcaaattactggcggcaaaactgggttatcgccttaaagcggcggtgtctaacgatgccagcaccatcagcgtacaggacggtaaagcgacagtgaaacacatggtttacggtggtctggcgattggcgaagaacgcattgccacgccgtatgcggtactgaccatcagcagcggcacgttcgatgcggctcagccagacgcgtcacgcactggcgaaacgcacaccgtggagtggcaggctccggctgtggcgattacccgcacggcaacccaggcgcgccagagcaacagcgtcgatctcgacaaagcccgtctggtggtcagcgtcggtcgcggtattggcagcaaagagaacattgcgctggcagaacagctttgcaaggcgataggtgcggagttggcctgttctcgtccggtggcggaaaacgaaaaatggatggagcacgaacgctatgtcggtatctccaacctgatgctgaaacctgaactgtacctggcggtggggatctccgggcagatccagcacatggttggtgctaatgcatcgcaaaccattttcgccatcaacaaagataaaaatgcgccgatcttccagtacgcggattacggcattgttggcgacgccgtgaagatccttccggcgctgaccgcagctttagcgcgttgatccactctggcagggctgcattttggtcctgccgctgacagggagctcttatgtccgaagatatctttgacgccatcatcgtcggtgcagggcttgccggttcggttgccgcactggtgctcgcccgcgaaggggcgcaagtgttagttatcgagcgtggcaattccgcaggtgccaagaacgtcaccggcgggcgtctctatgcccacagcctggaacacattattcctggtttcgccgaatccgccccggtagaacgcctgatcacccatgaaaaactcgcgtttatgacggaaaagtcagcgatgactatggactactgcaacggtgacgaaacctcgctatcccagcgttcttactccgttttgcgcagtaaatttgatgcctggctgatggagcaggccgaagaagcgggcgcgcagttaattaccgggatccgcgtcgataacctcgtacagcgcgatggcaaagtcgtcggtgtagaagccgatggcgatgtgattgaagcgaaaacggtgatccttgctgatggagtgaactccatccttgccgaaaagctggggatggcaaaacgcgttaaaccgacggatgtggcggttggcgtgaaggaactgatcgagttaccgaagtcggtaatcgaagaccgttttcagttgcagggtaatcagggcgcggcttgtctgtttgcgggatcacccaccgatggcctgatgggcggcggcttcctttataccaatgaaaataccctgtcgctggggctggtttgtggtctgcatcatctgcatgacgcaaaaaaatcggtgccgcaaatgctggaagatttcaaacaacatccggccgttgcaccgctgatcgcgggtggcaagctggtggaatattccgctcacgtagtgccggaagcaggcatcaacatgctgccggagttggttggtgacggcgtattgattgccggtgatgccgccggaatgtgtatgaacctcggttttaccattcgcggtatggatctggcgattgccgccggggaagccgcagcaaaaaccgtgctttcagcgatgaaaagcgacgatttcagtaagcaaaaactggcggaatatcgtcagcatcttgagagtggcccgctgcgcgatatgcgtatgtaccagaaactaccggccttccttgataacccacgcatgtttagcggctacccggaactggcggtgggcgtggcgcgtgacctgttcaccattgacggcagtgcgccggaactgatgcgcaagaaaatcctccgccacggcaagaaagtgggcttcatcaatctgatcaaggatggcatgaaaggagtgaccgttttatgacttctcccgtcaatgtggacgtcaaactgggcgtcaataaattcaatgtcgatgaagagcatccgcacattgttgtgaaggccgatgccgataaacaggccctggagctgctggtgaaagcgtgccccgcaggtctgtacaagaagcaggatgacggcagtgtgcgcttcgattacgccggatgtctggagtgcggcacctgtcgcattctggggctggggtcggcgctggaacagtgggaatacccgcgcggcacctttggtgtggagttccgttacggctgatgttggtttgatacgtaacgccgtactgactctcattgcaaaaaaacaggaataacccatgcaaccgtccagaaactttgacgatctcaaattctcctcaattcaccgccgcattttgctgtggggaagcggtggtccgtttctggatggttatgtactggtaatgattggcgtggcgctggagcaactgaccccggcgctgaaactggacgctgactggattggcttgctgggcgcgggaacgctcgccgggctgttcgttggcacatcgctgtttggctatatctccgataaagtcggacggcgcaaaatgttcctcattgatatcatcgccatcggcgtgatatcggtggcgacgatgtttgtttcatcccccgtcgaactgttggtgatgcgggtacttatcggcattgtcatcggtgcagattatcccatcgccacctcaatgatcaccgagttctccagtacccgtcagcgggcattttccatcagctttatcgccgccatgtggtatgtcggcgcgacctgcgccgatctggtcggctactggctttatgatgtggaaggcggctggcgctggatgctgggtagcgcggcgatcccctgtttgttgattttgattggtcgattcgaactgcctgaatctccccgctggttattacgcaaagggcgagtaaaagagtgcgaagagatgatgatcaaactgtttggcgaaccggtggctttcgatgaagagcagccgcagcaaacccgttttcgcgatctgtttaatcgccgccattttccttttgttctgtttgttgccgccatctggacctgccaggtgatcccaatgttcgccatttacacctttggcccgcaaatcgttggtttgttgggattgggggttggcaaaaacgcggcactggggaacgtggtgattagcctgttctttatgctcggctgtattccgccgatgctgtggctaaacactgccggacggcgtccattgttgattggcagctttgccatgatgacgctggcgctggcggttttggggctgatcccggatatggggatctggctggtagtgatggcctttgcggtgtatgcctttttctctggcgggccgggtaatttgcagtggctctatcctaatgaactcttcccgacagatatccgcgcctctgccgtgggcgtgattatgtccttaagccgtattggcaccattgtttcgacctgggcactgccgatctttatcaataattacggtatcagtaacacgatgctaatgggggcgggtatctcgctgtttggcttgttgatttccgtagcgtttgccccggagactcgagggatgtcactggcgcaaaccagcaatatgacgatccgcgggcagagaatggggtaaattgttcagatttctctcttttctgaatcaatattattgactataagccgcgtgaatatatgactacactttgtgggaaaacaaaggcgtaatcacgcgggctacctatgattcttataatttatgcgcatccgtatccgcatcattcccatgcgaataaacggatgcttgaacaggcaaggacgctggaaggcgtcgaaattcgctctctttatcaactctatcctgacttcaatatcgatattgccgccgagcaggaggcgctgtctcgcgccgatctgatcgtctggcagcacccgatgcagtggtacagcattccaccgctcctcaaactttggatcgataaagttttctcgcacggctgggcttacggtcacggcggcacggcgctgcatggcaaacatttgctgtgggcggtgacgaccggcggcggggaaagccattttgaaattggtgcgcatccgggctttgatgtgctgtcgcagccgctacaggcgacggcaatctactgcgggctgaactggctgccaccgtttgccatgcactgcacctttatttgtgacgacgaaaccctcgaagggcaggcgcgtcactataagcaacgtctgctggaatggcaggaggcccatcatggatagccatacgctggttcaggcgctgatctacctcggatcggcggcgctgattgtacccattgcggtacgtcttggtctgggatcggtacttggctacctgattgccggctgcattattggcccgtgggggctgcgactggtgaccgatgccgaatctatcctgcactttgccgagattggcgtggtgctgatgctgtttattatcggcctcgaactcgatccacaaaggctatggaagctgcgtgcggcagtgttcggcggcggcgcattgcagatggtgatttgcggtggcctgctggggctgttctgcatgttacttgggctgcgctggcaggtcgcggaattgatcggcatgacgctggcgctctcctctacggcgattgccatgcaggcgatgaatgaacgcaatctgatggtgacgcaaatgggtcgcagtgcctttgcggtgctgctgttccaggatatcgcggcgatcccgctggtggcgatgattccgctactggcaacgagcagtgcctcgacgacgatgggcgcatttgctctctcggcgttaaaagtggcgggtgcgctggtgctggtggtattgctggggcgctatgtcacgcgtccggcgctgcgttttgtagcccgctctggcttgcgggaagtgtttagtgccgtggcgttattcctcgtgtttggctttggtttgctgctggaagaggtcggcttgtcgatggcgatgggcgcgtttctggcgggcgtactgctggcaagctcggaataccgtcatgcgctggagagcgatatcgaaccatttaaaggtttgctgttggggctgtttttcatcggtgttggcatgtcgatagactttggcacgctgcttgaaaacccattgcgcattgtcattttgctgctcggtttcctcatcatcaaaatcgccatgctgtggctgattgcccgaccgttgcaagtgccaaataaacagcgtcgttggtttgcggtgttgttagggcagggcagtgagtttgcctttgtggtatttggcgcggcgcagatggcgaatgtgctggagccggagtgggcgaaatcgctgaccctggcggtggcgctgtcgatggcagcaacgccgattctgctggtgatcctcaatcgccttgagcaatcttctactgaggaagcgcgtgaagccgatgagatcgacgaagaacagccgcgcgtgattatcgccggattcggtcgttttgggcagattaccggacgtttactgctctccagcggggtgaaaatggtggtactcgatcacgatccggaccatatcgaaaccttgcgtaaatttggtatgaaagtgttttatggcgatgccacgcggatggatttactggaatctgccggagcggcgaaagcggaagtgctgattaacgccatcgacgatccgcaaaccaacctgcaactgacagagatggtgaaagaacatttcccgcatttgcagattattgcccgcgcccgcgatgtcgaccactacattcgtttgcgtcaggcaggcgttgaaaagccggagcgtgaaaccttcgaaggtgcgctgaaaaccgggcgtctggcactggaaagtttaggtctggggccgtatgaagcgcgagaacgtgccgatgtgttccgccgctttaatattcagatggtggaagagatggcaatggttgagaacgacaccaaagcccgcgcggcggtctataaacgcaccagcgcgatgttaagtgagatcattaccgaggaccgcgaacatctgtcattaattcaacgacatggctggcagggaaccgaagaaggtaaacataccggcaacatggcggatgaaccggaaacgaaaccctcatcctaataaagagtgacgtaaatcacactttacagctaactgtttgtttttgtttcattgtaatgcggcgagtccagggagagagcgtggactcgccagcagaatataaaattttcctcaacatcatcctcgcaccagtcgacgacggtttacgctttacgtatagtggcgacaattttttttatcgggaaatctcaatgatcagtctgattgcggcgttagcggtagatcgcgttatcggcatggaaaacgccatgccgtggaacctgcctgccgatctcgcctggtttaaacgcaacaccttaaataaacccgtgattatgggccgccatacctgggaatcaatcggtcgtccgttgccaggacgcaaaaatattatcctcagcagtcaaccgggtacggacgatcgcgtaacgtgggtgaagtcggtggatgaagccatcgcggcgtgtggtgacgtaccagaaatcatggtgattggcggcggtcgcgtttatgaacagttcttgccaaaagcgcaaaaactgtatctgacgcatatcgacgcagaagtggaaggcgacacccatttcccggattacgagccggatgactgggaatcggtattcagcgaattccacgatgctgatgcgcagaactctcacagctattgctttgagattctggagcggcggtaattttgtatagaatttacggctagtgccggatgcgacgccggtcgcgtcttatccggccttcctatatcaggctgtgtttaagacgccgccgcttcgcccaaatccttatgccggttcgacggctggacaaaatactgtttatcttcccagcgcaggcaggttaatgtaccaccccagcagcagccggtatccagcgcgtatataccttccggcgtacctttgccctccagcgatgcccagtgaccaaaggcgatgctgtattcttcagcgacagggccaggaatcgcaaaccacggtttcagtggggcaggggcctcttccggcgattctttgctgtacatatccagttgaccgttcgggaagcaaaaacgcatacgggtaaaggcgttggtgataaaacgcagtcttcccagcccccgcaattccggtgaccagttatttggcatatcgccgtacatagcgtcgagaaagaagggataggagtcactcgatagcaccgcttctacatcgcgcgcgcactctttggcggtctgtagatcccactgcggcgtgatccctgcgtgggccatcaccaactttttctcttcgtcgatttgcagcaaaggctggcgacgcagccagttaagcagctcgtcggcatccggcgcttccagcagcggtgtcaggcgatctttcggtttattgcggctgatcccggcaaataccgccagcagatgcagatcgtgattgcccagcaccagacgtacgctgtcgcctaaggatttcacatagcgcagaacatccagcgaacccgggccgcgcgcgaccagatcgcccgtcagccagagggtatctttcccaggggtaaattctactttatgcagcaatgcgatcagttcatcgtaacaaccatgaacgtcgccaataaggtatgtcgccatattcttttaatgaatgagtgtgggaacggcgagtcggaatacgggaatgtcgatgctgaaagggacgccattttcatcgatcatttcgtagtgaccctgcatggtgcccagcggggtttcaatgattgcaccgctggtgtactggtactcttcgccaggcgcgataagtggctggacgccaaccactccttcgccctggacttcggtttcacggccattgccattggtgatcagccagtaacgccccaacaactgcactggcgctcgccccagattgcgtatggttacggtataagcaaaaacgtaacgttcattatcaggtgaagattgtgcctcaatgtagacgctttgaacctgaatacacactcggggcgaattgatcatcgttaactctcctgcaaaggcgcgttctccgccagatagttcgccatctggcaatattgcgcgacagagatattttccgctcgcatcgccgggtcgatccccattcccgttaacacctcggcgctaaacaggttgccgaggctgttacgaatggttttacgacgctggttaaaggcttcggtggtgatgcggctcaacacacgaacatctttaaccgggtgaggcatcgttgcatgaggaaccaggcgcacgacggcggaatccactttgggtggtggtgtaaaggctgacggcggaacttccagtaccgggatcacgttgcaatagtattgcgccatgacgcttaatcgaccatacgctttgctgttcggtcctgcaaccagacgattcaccacctctttttgcaacataaagtgcatgtcggcaatggcatcagtatagctaaacagatggaacatcaacggcgtggagatgttataaggcaggttgccgaaaacacgcagcggctgacccattttctcggccagttcgccaaagttaaaggtcatcgcatcctgctgataaatcgtcagtttcgggcctaagaatggatgcgtttgcagacgtgccgccagatcgcggtcaagttcgatgaccgtcagctggtccagacgttcgccgaccggttcggtcaatgccgccagaccggggccgatttcgaccatcgcctggcccttttgcgggttaatggcagaaacaatactgtcgatcacgaactgatcgttgagaaagttttgcccgaagcgtttacgggctaagtggccctggtggactcgattattcattgggtgttaacaatcattttgatggcgagattaagcgccgtaataaaactgccgacatcggctttaccacgtcccgccagttcaagcgcggtgccgtggtccactgatgtgcgaataaagggcaggcccagcgtaatgttcacaccgcgcccgaagccctggtattttagcacgggaagaccctgatcgtggtacatcgccagcacggcgtcggcgttatcgagatatttcggctgaaacagggtatcggcaggcagcggcccgttgagtttcatcccctgcgcccgcagctcgtcgagcaccggaataatggtgtctatctcttccgtacccatatgaccgccttcgcccgcgtgcggattcagcccgcagaccagaatgcgcggttcggcaataccaaattttgtacgcaaatcgtgatgcaaaatagcaatcacttcgtgcaaaagtgcaggggtgatagcatctgcgatatcgcgcagcggtaaatgcgtcgttgccagcgccacgcgaagttcttcggtcgccagcatcatcaccacttttttcgcctgcgaacgctcttcgaaaaactcggtatgaccggtaaacggaatgcctgcgtcgttaatgacgcctttatgcacggggcctgtgatcagcgcagcaaattcaccgttcagacagccatcacacgctcgcgccagcgtctccaccacgtaatgtccattttcaatcgctaactgccccgcagtgacagattcacgtagcgcgacaggaagtagcgttaatgtgcccgtagtttgcggttgtgcaggggagttgggggaataagggcggagggtgagcggcaaaccgagcatcgctgcccggtcgataaggagagtggcatcggcacaaacaaccagttcgaccggccactcacgctgtgcaagctggacaactaagtccgggccaatcccggcgggctcgccgggagtgatcacaacacgttgggttttaaccattagttgctcaggattttaacgtaggcgctggcacgttgttcctgcatccagcttgctgcttcttccgagaacttacggttcatcagcatgcggtatgcacgatctttctgcgcagcgtcggttttatcgacattacgggtatccagcagttcgattaaatgccagccgaatgaagagtgaaccggtgcactcatttgacctttgttcaggcgagtcagggcgtcacggaaggccggatcgaaaatatctggtgtagcccagccgagatcaccgccctggttagcggagcctggatcctgagagaactctttcgctgcggcagcaaaagtcgttttaccactcttgatatcagcagcaatctgttccagtttcacgcgtgcctgttcgtcagtcatgatcggcgacggtttcagcagaatatggcgagcatgaacttcggtcaccgagatatttttgctttcgccgcgcaggtcgttaactttcagaatatggaagccaacgccggaacgaatcgggccaacaatgtcgcctttcttcgcggtgcttaatgcctgggcgaagatccccggcaactcctgaatacggccccagcccatctggccgccgttcagcgcctgctggtcggcagaatgagcaatcgccaacttaccgaaatcagcgccgttacgcgcctgatcgacaatggcacgcgcctggctttccgcttcgttcacctgatcagaggtcgggttttccggcagcgggatcaggatgtggctcaggttcagctcagtgctggcgtcgttttggttacccacctgctgcgccagggattcgacttcctgcggcaggatggtgatgcgacgacgcacctcgttgttacgcacttcagagataatcatctctttgcggatctggttacgataagtgttgtagttcagaccatcgtaagccagacggctgcgcatctgatccagcgtcatgttgttctgtttcgcgatgttagcaatcgcctgatccagctgctcatcggagattttcactcccattttctgccccatctgcaggatgatttgatccatgatcaaacgttccatgatttggtggcgcagcgtcgcgtcatcaggaagttgctgccttgcctgagcagcgttcagttttaccgactgcattaatccatcaacgtcgctttccagcacgacgccgttattgacgacggctgcgactttatcgactacctggggggcagcgaaactggtattcgcgatcatggcgataccgagaagcagcgttttccagttcttcatactttttccatttcaattaaccgcactgcggattacgtggtaaatcaacaaatcacaaagtgttttgatacggcagaatgttcgaacgcagcatctcttgcgtacccagaccgtagttggagctcaggccgcgaagttcgatgttaaagccgattgcgttgtcatataccgcatgttgtttatcgttatcccaaccgttcagcttccgctcgtaaccgacgcgaattgcatagcagcaggagctgtattgcacacctaacatagagtcggcttgcttgttcgcattggtgtcgtagtagtaggccccaacaatggaccaacgatcggcaattggccagctggcgacagcacctacctgcgaaataccattcttatattgctcagcagtggaatagtacttaggcagcgtagcctgaatatattccgggctggcgtaacggtaattcagctgtaccagacggtcttcatcccgacggtattcaatgctggagttactggtcgctacgttatccagacgtgtatcgtactgaatcccgccacgcaatccccaacgctcggagatacgccagtaagtatcgcctgcccacaccagtgaacccgttttgtcgtcattctcccatgttatgttgtcatcgccagtgcgagactccgtgaaatagtagatttgaccaacggaaatattaaaacgttcaacggcagcatcatcatatatgcgagatgtgacaccggtcgtcacctggttagcggaggcaatacggtcaagaccgccgtaagtccggtcccggaacaggccagagtagtcagattgcagcagagacgagtcgtagttatagatgtcgctctgatcgcgatacggcacgtacaaatactgcgcgcgcggttccagcgtttgggtataacccggagccagcatttccatatcgcgttcaaagaccattttgccgtcaactttgaattgcggcattacgcggttaacggattcgtccagcttggtcgtgtttctggagttataccagtcaagattggtttgctgataatgggttgccagcaacttcgcttcggtattgatgctgccccagttattagagagcggcaaattgatggtcggttccaggtgaacacgggttgcttcaggcatgtcgtctctggtgttaacaaagtgcactgcctggccgtaaatacgcgtatcaaacggaccaacatcattctggtagtaattaacgtctaactgcggctctgccgagtagctactggtgttctgttcgctgaaaacctggaactgcttggttgaaacggtggcattgaagttttgcaccgcatagccaacgctgaatttttgcgttgcgtagccgtcagtactggaaccgtacttgttatcgaaatcattgaagtagctaggatcgctgaccttggtgtagtcgacgttgaaacgccacacttgatccatgaccccggagtggttccagtagaataaccaacgacgtgaactgtcatcgttcgggtgttcatcttcatagactttatctgaaggcagatagtccagttccatcaagccagcgcccgcctgggagaggtagcggaattcgttctcccacatgatgttgccacgacgatgcatataatgcggcgtgatggtggcatccatatttggcgcgatgttccagtaatatggcaggtagaactcaaagtagttggtggtggtgtacttggcgttcgggatcaagaaaccagagcgacgtttgtcacccaccggcaactgcaaataggggctataaaagatcggtaccggacccaccttaaagcgggcgttccagatctccgcaacttgttcttcgcggtcatgaataatttcgctacctaccacgctccaggtgtcagaacccggcagacaggaggtaaagctaccgttatccagaatggtatagcggttttcgccacgttgtttcatcaggtccgctttaccgcgaccctggcgacccaccatctggtaatcaccttcccagacgttggtatctttggtgttcagattcgcccagcctttcggccctttgaggatcacctggttatcgtcgtaatggacattaccgagcgcatcaacggtacgtaccggctccggttgtcctggtgcctctttttgatggagctgcacttcgtcggcctgcagacggctgttaccctgcatgatatccacgctgccagtaaacacggcgtcatccgggtagtcccctttcgcgtggtcagcattgatagtcacgggtaagtcattggtatcgccctgtaccagaggacggtcatagcttggcacgcccaacatgcactgtgaggcgaggtcggctgccagtccctgttgactataaagggcggtggcaatcatggtggccaggagagtggggatacgttttttcatacgttgattttattgttccatcatcggtaacgttgcgcgtgacaaacggtcagagactaacgtactcgtcatctctacgctagtgttaatcctgtccgaatagcgtcagtggtgttaggcacggcattgaatgacaggtatgataatgcaaattataggcgatgtcccacaattgaccgcagccggaaaacggtaaaagcacctttatattgtgggagatagccctgatatccgtgtgtcgatttggggaatatatgcagtattggggaaaaatcattggcgtggccgtggccttactgatgggcggcggcttttggggcgtagtgttaggcctgttaattggccatatgtttgataaagcccgtagccgtaaaatggcgtggttcgccaaccagcgtgagcgtcaggcgctgttttttgccaccacttttgaagtgatggggcatttaaccaaatccaaaggtcgcgtcacggaggctgatattcatatcgccagccagttgatggaccgaatgaatcttcatggcgcttcccgtactgcggcgcaaaatgcgttccgggtgggaaaatcagacaattacccgctgcgcgaaaagatgcgccagtttcgcagtgtctgctttggtcgttttgacttaattcgtatgtttctggagatccagattcaggcggcgtttgctgatggttcactgcacccgaatgaacgggcggtgctgtatgtcattgctgaagaattagggatctcccgcgcccagtttgaccagtttttgcgcatgatgcagggcggtgcacagtttggcggcggttatcagcagcaatctggcggtggtaactggcagcaagcgcagcgtggcccgacgctggaagatgcctgtaatgtgctgggcgtgaagccgacggatgatgcgaccaccatcaaacgtgcctaccgtaagctgatgagtgaacaccatcccgataagctggtggcgaaaggtttgccgcctgagatgatggagatggcgaagcagaaagcgcaggaaattcagcaggcatatgagctgataaagcagcagaaagggtttaaataagttttaaactgtaggcctgataagacgcggcccgcgtcgcatcaggcaatcggcgcacaattgccggatgcggcgtgaacgccttatccgcctaccgaactgcgccagcgtgacgattaaaaatccgctggcgctttaaacgtcatactattgccatacgccggatgggtaatcgtcaacatctctgcatgtagcaacaaacgcggtgccatcgctctcgcttctggtgatgcataaaaacgatcgccgagaatcggatgccccagcgccagcatatgcacacgcaattgatgcgaacgcccggtaatcggttttaacaccactcttgccgtgttatccgccgcatactccaccacttcatattccgtctgcgcaggtttacccgtttcgtaacagactttctgtttcgggcggtttggccagtcgcaaatcagcggcagatccaccagaccttctgcgggggatggatgcccccagacgcgggccacatactgctttttcggctcgcgctcgcggaactggcgttttaactcccgctccgcggctttggtcagcgccactacaatcacgccgctggtagccatatccagacgatgcaccgattctgcctgcggataatcacgctgaatgcgcgtcatcacgctatctttgtgctcttccagacgacccggcacagacaacaaaccgctcggcttgttaaccaccataatgtggtcatcctgatacaggataaccaaccagggttcctgcggtggattgtagttttccatccccattttcggctccgttactgatgcgttacaacgatcaaacgcagggcatccagacgccagcctgcctgatccaggctttccattacctgctgacggttgctctcaatggcggtcagttcgtcgtcacgaatgttcgggttcactgcgcgcagcgcttccagacgagacagctcggcagacagtttttcgtcggcttcgttacgtgcggcatcaatcaatgcacgggcagatttctcgatctgcgcttcacccagctgaaggatagcgtgaacatcctgctgcacggcgttaaccagtttgctgccggtgtgacggttaaccgcgttaagctggcggttaaaggtttcaaactccacctgggccgccaggttgttgccgtttttatccagcagcatacgtaccggcgtcggtggcaggaagcggttgagctgcaactgcttcggcgcctgggcttcgaccacgtaaatcagttccaccaacagcgtacctaccggcaacgctttgttttttaacagtgaaatcgtgctgctaccggtatcgccagaaagaatcagatccagaccgttgcggatcagcggatgttcccaggtaataaactgagcatcttcacgcgccagcgccacttcacgatcaaaggtgatggtgatgccatcttccgacaggccagggaagtccggcaccagcatatgatcggacggggtcagcacgatcatgttgtcgccgcgatcgtcctgattgataccgataatatcgaacaggttcatggcgaaggcgatcaggttggtatcgtcatcctgctcttcaatgctttctgccagtgcctgggctttttcgccaccgttggagtggatttccagcaggcgatcacgcccctgttccagttgtgctttcagcgcttcatgttgctcgcggcagtttttgatcagatcgtcaaagccttcggtttgatccggtgaagccagatagttaatcagatcgttgtagacgctatcgtaaatagtgcgtccggtcgggcaggtgtgctcgaatgcatccagaccttcgtgataccagcgcaccagcaccgactgagcagttttttccagataaggcacatggatctgaatatcgtgcgcctgaccgatacgatccagacgaccaatacgctgctccagcagatccgggttgaatggcaggtcaaacattaccatgtggctggcgaactggaagttacgtccttcagaaccgatttctgagcacagcagtacctgtgcgccggtgtcttcttcggcaaaccaggcggcagcgcggtcacgttcgataatcgacataccttcgtggaacaccgcagcgcgaataccttcacgttcgcgcagtacctgctccagttgcagcgcagtggcagctttggcgcagatcaccagcactttctgagagcgatggctggtcaggtagcccatcagccactcaacgcgcggatcgaagttccaccaggtggcgttatcaccttcaaattcctgataaatacgctccgggtagagcatatcgcgagcacgatcttccgcacttttacgtgcgcccataatgccggagactttaatagccgtctgatactgcgtcggtagcggcagtttaatggtgtgcagctcgcgtttcgggaatcctttcacaccgttacgcgtgttacggaacagcacgcggctggtgccgtggcgatccatcagcatcgaaaccagctcctgacgggcgctctgggcatcttcgctgtcgctgtttgctgcctgcaacagcggctcgatatcctgctcgccgatcatctcgccgagcatgttcagttcgtcattgctcagtttgttacctgccagcagcatggcaacggcgtccgcaaccggacgataatttttctgctcttcaacgaactgcgcaaaatcgtggaaacggttcgggtccagcagacgcagacgggcgaagtggctttccatccccagctgttccggggtcgcggtcagcagcagaacgcccggcacgtgctctgccagttgttcaatggcctgatattcacggcttggcgcatcttcgctccacaccaggtgatgcgcttcatcgaccaccagcaggtcccattcggcttcacagagatgttccaggcgctgtttgctacgacgggcaaaatccagcgagcaaatcaccagctgttcggtgtcaaacgggttgtaagcatcgtgctgagcttcggcataacgctcatcatcaaatagcgcaaagcgcaggttgaaacggcgcagcatttctaccagccactgatgctgtaaggtttccgggacgataattagcacacgttcagcagcgccagagagcagttgctgatgcaggatcatcccggcttcaatggttttccctaaacccacttcgtcagccagcaggacgcgcggcgcgtggcggcgaccaacatcatgagcgatgttgagctgatgcggaatcaggctggtacgctgaccgcgcaggccgctgtacggcatacggaactgttcgctggaatacttacgcgcgcgataacgcagcgcaaagcggtccatacggtcaatctgcccggcaaacagacggtcctgcggtttgctgaacaccagtttgctatcaaggaaaacttcacgcagggctacgccggactcttcagtatccaggcgagtaccgatataggtcagcaagccattttcttcttttacttcttcgacttgcatctgccagccgtcatggctggtaatagtatcaccagggttgaacatcacgcgggtcacgggggaatcactgcgtgcgtacagacggttttcaccagtagatgggaaaagtaaagtgacagttcgcgcatccaccgcgacaacggttccaagtcccaattcgctttctgtatcgctgatccagcgttgaccaagtgtaaaaggcatatgtgttcggctctatatctttaattgcaggcaataaccacccgctaccgtgcttatgaggtagtggtgttattcaggtccaggaatggaaagggcgctatggtactggatggcaaagcattcgtcacgcatcaaaatggtatctggcgaactcttttttttgctcaaaatagcccaagttgcccggtcataagtgtagcaaaattatcctcaataaaagggagtattccctccgccacgggttgtagctggcgggtcagatagtgttcgtaatccagtggtgaacgttggtagtccagcggctccgggccgttggtggtccatacgtacttaatggtgccgcgattctgatattgcaaggggcgaccgcgcttttggttttcttcatcggcaaggcgagcggcgcgtacatgaggcggcacattacgctgatactcgctcagcggacggcgaaggcgtttacggtaaaccagtcgcgcatccagttcacccgccatcagtttgtcgatggtttcgcgtacatattcctgatatggctcgttgcggaagatgcgcaggtatagctcctgctnnanntgctggncnnncggcgtccagtcggtgcgcacggtttccagccctttaaacaccatccgctgtttatcgccctcctgaatcagcccggcgtagcgctttttactgccggtatcggctccgcgaatggttggcatcagaaaacggcagaaatgagtttcatactccagttctaatgcgctggtcagccgttgtttttgcagcgtttccgcccaccaggcgttaacgtgctgcaccagtacacgaccgattttcgccgcctcttcttccgaatgtgcaccttttagccagacaaaagtcgagtcggtatctccgtagataacgtcgtagccctgcgcttcaatcaatgctttggtctgccgcatgatctgatgaccacgcatggtgatcgacgatgccaggcgcggatcgaagaagcggcaggcggtggtgccgagcacgccataaaaggcattcataatgatcttcagcgcctgcgaaagcggcttattaccctgacgtttggcttcatcgcgcccgtgccagatgttagtcacaatctccggcaggcaatgtttctcccgtgagaaccaggcatcgagaaaaccttcggtactgtgctctggatcaggttgcgccatgccttcaaccagcccgacgggatcaatcagaaaggtgcggatgatcgacgggtacaggcttttatagtccagcaccagcactgaatcataaagccctggccgtgaatccatcacgtagccgccagggctggcgtgcggtggcacttcgccgagattaggcgcgacataaccagcgcgatgcattcgcggaaaatagagatgaccaaacgctgccaccgaaccgccgtgccgatccaccggcaggccgttcaccgttgctcgttcgagtaaaaatggcatgatttcagttttgtggaagatctgcgtcaccagctcgcaatctttcaggttataagttgccagcgcaggtttatcttcggcgaaacggcggtcaatttcgtccattcgatcccacgggttatcgatagattttccttcgcctaatagctcctgagcgacagtttccagcgagaatgaagagaaattccagaacgcggatttcagcgcctcgataccgtcgataattagccgacctttagcctgggcaaaaaagacgccgtttttaaagccgtgctcgcgccactccagctcgctattatcgcgcccaagacgcagcggaagacggtaacgctcggcatgtttttgcagcattcgcagatcgaactgcaccacgttccagccgatgatcacatcgggatcgtggtttgcaaaccaggcgttgagtttttccagcagcagcgggcggctggcgacgtattccagttcgaaatcaagcgaggaggcgtcgccattctccggccccagcatataaacgatgcgctgcccgcagccttccaggccgatgcagtacagctcaccgtggcgggtggtttcaatatctatagaaacccacttgagcggcggacgatagtcgggatgcggtttcagacgggcattaacgatagtgccattgtgcatatcaccctcgacccacaccggtgaggtgataaaccgctccatcagatagcgttctggcgggcgcacatcggcctcgtagacggtaacgccaccttcacgcaggcgcttttcgtaattcatcaattggcgatgggcgcgacagtaaaggccatacaccggctggcggtgaaaatcctttaacgccagcggtgtcaggcgaaagccttgttcaccctgcaaaatatgctgagcgcggggaacctgatcggcgggaataaacgccacggactcttgcggtgcaagcgtaacctgcaacggcccgttgtccgtcgccagccagaaggagacttctgtcccttgcggggtgtcccgccagtgtcgggttaagataaaacctgcctgcgccacgctgaaaatccatcaaaaaaccaggcttgagtatagcctggtttcgtttgattggctgtggttttatacagtcattactgcccgtaatatgccttcgcgccatgcttacgcagatagtgtttatccagcagcgtttgctgcatatccggtaactgcggcgctaactgacggcagaatatccccatataagcgacctcttccagcacgatggcgttatgcaccgcatcttcggcatttttgccccatgcaaacgggccgtgggaatggaccagaacgccgggcatttgcgctgcatcgataccctgtttttcaaaggtttctacgatgacgttaccggtttcccactcatattcgccgttgatttctgcgtcggtcattttgcgggtgcagggaatggtgccgtagaaatagtcggcgtgggtggtgccggttgctggaatcgactgacccgcctgcgcccagatggtggcgtggcgcgagtgcgtatgcacaatgccgccaatggaggggaatgcctgatagagcagccggtgagttggcgtgtcggaggagggctttttcgtaccttcaaccacttcaccggtttcgatgctaaccacgaccatatcgtcagcggtcatgacgctgtaatcgacgccggaaggtttgatcacaaagacgccgcgctcgcgatcaacggcgctgacgttgccccatgtgagcgtgaccaggttgtgttttggcagcgccaggttggcttctaatacctggcgtttgagatcttctaacatgttgactcctgagaggtcgtttcccctcaccccggccctctccccaaaggggcgagggggaaaacaatgccggatgcgctttgcttatccggcctacaaaatcgcagcgtgtaggccagataagacgcgtcagcgtcgcatcaggcgttacatacctgatgtggctacttagcgacgaaatccgtaatacacttcgttccagcgcagtgcgtctttaaacgctggcaggcgggtgtcgttatcaatcaccgtgatttcaatgtcgtgcatctcggcgaactggcacatatcgttgaggttcagcgcatggctgaagacggtatggtgcgcgccaccagcaaggatccacgcttcggaagcagttggcagatccggttgcgctttccacagcgcattcgccaccggcagtttcggcagggagtgcggtgttttcaccgtgtcgatacagttaaccagcagacggtaacgatcgccgagatcaatcaggctggcgacaatcgctggaccggtttgggtattgaagatcagtcgggcaggatcgtccttaccaccaataccgagatgctgaacgtcgaggatcggtttctcttctacggcaatcgacgggcagacttccagcatatgggagccgagcaccaggtcattacctttctcgaagtgataggtgtagtcctccataaaggaggtgccgccctgcagaccggttgacatcaccttcatgatgcgaagcagggcggcggttttccagtcgccttcgcccgcaaagccgtaaccctgctgcatcagacgctgtacggccagacctggaagctgtttcagaccgtgcaaatcttcaaaggtggtggtgaacgcgtggaagccaccttgttccaggaaacgcttcatccccagctcaatacgcgccgcttccagcacgttctgtcgtttttcgccgtggatttgtgtggcaggcgtcatggtgtagcagctttcgtactcatcgaccagcgcgttaacatcgccgtcgctgatggagttcaccacctgcaccagatcgccaaccgcccaggtattgacggagaaaccgaacttgatctgtgcggcaactttatcaccatcggtgaccgctacttcacgcatgttatcgccaaaacggcagactttcagatgacgggtatcctgtttagagaccgcctggcgcatccaggagccgatacgctcatgggcttgtttatcctgccagtgaccggtaaccacggcatgttgctgacgcatacgcgcgccaatgaagccgaactcgcgaccgccatgtgcagtctggttcaggttcataaagtccatatcgatactgtcccacggcagcgccgcgttaaactgggtgtggaattgcagcaacggtttgttgagcatggtcaggccgttgatccacattttggccggggagaaggtgtgcagccacaccaccagaccagcgcaacgatcgtcgtaattcgcgtcgcggcaaatagcggtgatttcatccggcgtggtgcccagcggtttcaacaccagtttgcagggcagtttcgcttccgtattcagcgcattaacaacgtgctcggcatgttgggtgacctgacgcaggtttccgggccatacagatgctggctgccaatgacaaaccacacttcataattatcaaaaatcgtcattatcgtgtccttatagagtcgcaacggcctgggcagcctgtgccggggcggaagttggaagatagtgttgttcggcgctcatcgcccattgctgatagcggcgataaagctgttcaaagcgttgtgcctgttcgctgcgcggttgcagggttttctctaccgcactggccattttttgctgggctgatgggatgtctgcgtgcactttcgcggcgacggcagcaaaaatcgccgcaccgagcgcacagcactggtcagaggcaacaatttgcagcgggcgattcagcacgtcgcagcaggcctgcataatgacctggtttttccgcgcgatgccgcccagcgccatcacgttattgacggcgatcccctgatcggtaaagcactccatgattgcgcgtgcgccaaaggcggtggcagcaatcaaaccgccgaacagcagcggagcgtcggtagcgaggttaagatcggtaatcacccctttcaggcgttggttagcgttcggtgtgcggcggccgttaaaccagtcgagcaccaccggcaggtgatccagagacggatttttggcccatgcttcggtcagcgccggaagcagttgtttctggctggcgttgatttgcgctttcagttccggatgctgggcggcaagctgttccagcggccagccgagtacgcgaccaaaccaggcgtagatatcaccaaacgccgattggcctgcttccagaccgataaatccaggtaccacgctgccatcaacctgaccgcaaatacctttcactgcccgctcgccaacgctctgtttgtcggcaatcagaatgtcgcaggtggaagtaccgataacttttaccagtgcgttaggctgtgcgcctgcgccaactgcgcccatatggcagtcaaacgcgccgccggaaatcaccacgctttcaggcaggccgagacgctgcgcccattccgggcataaggtgcccaccggaatatcggcagtccaggtgtcagtgaacagcggggaaggcaaatggcgattgaggatcgggtccagctcatcaaagaaactggctggcggcaagccaccccagctttcgtgccatagcgacttatgcccggcgctgcaacgtccgcgacgaatatcctgcgggcgggtggtaccggaaagcagagctggcacccagtcgcacagctcaatccacgatgcggcagattgcgccacggcggtgtcctggcgagtcacatgcaggatttttgcccagaaccattcgctggaataaataccgccaatgtagcgggagtagtcaacgttgcccggcgcgtggcacaaacgggtaatctcttccgcttcttcaaccgcagtgtggtctttccacaatacgaacatcgcgttcgggttttcggcaaactccgggcgcagcgccagcacgttaccgtcggcatcaatcggtgcgggcgtcgagccggttgtgtcaacgccaatcccgaccacagctgcgcgctgttcgacgctaagctctgcaagcacggttttcagtgccgcttccattgactcaatgtagtcacgcggatgatgacggaactggttattcggggcatcacaaaattgccctttttgccaacggggataccactctacgctggtggcgatctcttcaccgctggcgcagtccaccgccaaagctcgcacagaatcactgccaaaatcgaggccaattgcaatcgccatcgtttcactccatccaaaaaaacgggtatggagaaacagtagagagttgcgataaaaagcgtcaggtaggatccgctaatcttatggataaaaatgctatggcatagcaaagtgtgacgccgtgcaaataatcaatgtggacttttctgccgtgattatagacacttttgttacgcgtttttgtcatggctttggtcccgctttgttacagaatgcttttaataagcggggttaccggttgggttagcgagaagagccagtaaaagacgcagtgacggcaatgtctgatgcaatatggacaattggtttcttctctgaatggcgggagtatgaaaagtatggctgaagcgcaaaatgatcccctgctgccgggatactcgtttaatgcccatctggtggcgggtttaacgccgattgaggccaacggttatctcgatttttttatcgaccgaccgctgggaatgaaaggttatattctcaatctcaccattcgcggtcagggggtggtgaaaaatcagggacgagaatttgtttgccgaccgggtgatattttgctgttcccgccaggagagattcatcactacggtcgtcatccggaggctcgcgaatggtatcaccagtgggtttactttcgtccgcgcgcctactggcatgaatggcttaactggccgtcaatatttgccaatacgggtttctttcgcccggatgaagcgcaccagccgcatttcagcgacctgtttgggcaaatcattaacgccgggcaaggggaagggcgctattcggagctgctggcgataaatctgcttgagcaattgttactgcggcgcatggaagcgattaacgagtcgctccatccaccgatggataatcgggtacgcgaggcttgtcagtacatcagcgatcacctggcagacagcaattttgatatcgccagcgtcgcacagcatgtttgcttgtcgccgtcgcgtctgtcacatcttttccgccagcagttagggattagcgtcttaagctggcgcgaggaccaacgtatcagccaggcgaagctgcttttgagcaccacccggatgcctatcgccaccgtcggtcgcaatgttggttttgacgatcaactctatttctcgcgggtatttaaaaaatgcaccggggccagcccgagcgagttccgtgccggttgtgaagaaaaagtgaatgatgtagccgtcaagttgtcataattggtaacgaatcagacaattgacggcttgacggagtagcatagggtttgcagaatccctgcttcgtccatttgacaggcacattatgcaagcattgctggaacactttattacccaatctaccgtgtattcattgatggcggtggtgttggtggcctttctggagtcgctggcgctggtcggtttgattctaccggtacggtgctgatggcggggctgggagcgctgattggcagcggcgagttaagtttctggcacgcctggctggcaggatcgtcggttgcctgctgggcgactggatctccttctggctgggctggcgttttaaaaagccgttgcatcgctggtcatttctgaagaaaaacaaagcattactcgataaaactgaacatgcgttgcatcaacacagcatgttcaccattctggtcggtcgttttgttggcccgacgcgtccgctggtgccaatggtggcgggaatgctggatctgccggtggcaaaattcattacgccgaatattatcggctgcctgctgtggccgccgttttacttcctgcctgggattctggcgggcgcggcgatcgatattccagccggaatgcagagcggcgagtttaaatggttgctgctggcgacggcggtatttttgtgggttggtggctggctgtgctggcggttatggcgcagcggtaaagcaaccgatcgtttaagtcattatttgtcgcgcggccgtttgttgtggctgacgccgttaatttctgccatcggcgtggtggcgctggtggtgttaattcgccacccgttgatgccggtgtatatcgatattttgcgtaaagtggttgggggttaggagatagtcttgtgcgggttgcctgatgcgacgctgaccgcgtcttatcaggcctacaaaacgcactacccgtaggtcggataaggcgttcacgccgcatccgacagtgcatactaacccgtaatccccaatagtgccgaagcactcgccttaccgctcaacaactcattggtcttaccctgccaggcgatgcgcccgtcggcgaccaccaccgagcgtgtggcgatccgcgccgcatcttccacactgtgcgacaccatcaatagcgtcattttttgctgctggcagctcgtgctcaccagcgtcagcatctcctgacgtaacgccggatcgagcgcagagaacggttcatcgagcaataaaatcggctgttcgcgcaccagacaacgcgctaacgccacgcgctgtcgctgaccgccggaaagctcgcccggtaaccgcgccattaaattatcaatccccatctggcgggcgatagcgtgcattttctcctgctgcgccgcgttcagcttcaatcccggattaagccccagcccgatgttctgcgcgaccgtcaggtggctgaacaggttgttctcctgaaacagcatcgataccgggcggcgtgacggcggcgtcgtggtgtgatcaacgctgtcgatagtcagcgaaccgctggctggcgtcagaaaaccggcaatcaaattcagcagggtacttttacccgcgccgcttggcccgaggattgccacctgctcgccgcgttctaccgttaagctaaaacgcatcggcaaatggtgataaagccaggtgatatcagtcagttttaacatttcgccccggtagtttttcaatcacggtaaacagcagaaaacagagtagtagcagaattaacgcggtgaccgcgccgtcctggctgcgataggagccaatttgctggtagagataaaacggcagggtacggaaatcatcgttaccgaacaacgccactacgccaaaatcaccaatcgacagcacgcaggcaaaagccagcgcctgcgccagtggacgtttcagggcgcgcagctcgaccacttttaagcgcgaccagccttcaatgcccagcgactgacacaacatactgtagcgggcggtgatatcgcgcatcgggttttccagtactttcagcgcataagggatcgccattaacgcattggtgaaaatcacaatgccgtcagcagattgcggcaggccaatggtgttgttgagcagtaaaaagaagccggtagccagcacaatccccggcatggcgaggatcaacatgccgctcatctccagcgcctgacccgccagcattttctgccgcgcccgcagttcgcgactgctccatagcagcatcatggtcagcactacgcacaatacacctgccgccagcgcaatacgcaacgaggtccacagcgcctgccacagcaccggttgtgccagcacttccggcaactggcgatttaccccatcgacgatcaccgccagcaacggtggcagcaacagcagcagcgccagcactattaacaccgtgtcgcaaatgcggctatgcagacgatcgtccggatcgcgccagccttgcagcagcgtggtaccgggcgcaatggccttacttagtcgctgactcaacagcaccagcccaaggcaacacaccatctggagcagcgccagcatcgccgcgcgggcaggatcgtagtcgtaactcagcgcctgataaatagccagctcgatagtagttgcctgcggaccgccgcccagcgatagcacggtggcgaagctggcgaaacagagcataaagataagcgcggcaaccggcgggatttgtcgccgtagccacggccattcgacgaagcggaaaaaatgccagccgcgcatcccaagctgggcggcaagctgacgttgttcgccgggaatgttttccagtgcctggagtaataagcggctcgccatcggcagattaaaaaatacgtgcgccagcaaaatgccttgcaggccgtagggcgaaaaggtccactccagaccgagcgattggcagagcgatgccagccagccctgacgaccatagacgctaagaatgccgaaaacagcaactagcaccgggaggatcaaggtcattgcgcacagacgcaacagcgccagccgacccggaaagcgcctgcgatagagggcgcgggcgaggaatatcgcgggtacgacagagagtagcgccgagagaaacgcctgccagaaggagaagcgcaccacatgacacaggtagctgtcctgccagattgccacccagttaccctgcggcgcgttccaccacagggcgagaaacgccgccagcgcaaccgctaccaccagcgtggcggcgcttacacctggaattaaccagccgggaattaacggctgacggcgcgttgccattcgctaatccatgcctgacgttgtgccgccacttcggctggcgtgaactccagcgtggttgcgggtttggtcaattgttcaaaaccggcaggcagcgtgacgtttgccaccggatacatccagttgccggttgggatcgcattctgaaaagccggagaaaccataaactggaggaatttttgcgccagctccggctgcttgctggcagcggtgcgggcggcgacttccacctgcagatagtgaccttcgctaaagttcgcggcggcgtagttatcttttttctcttcgagaatgtgataagccggagaggtggtgtaactcagtaccagatcgctttcaccttttaaaaacaggccgtaggcttcgctccagcctttggtgaccgtgacggttttcttcgccagtttttgccaggcttgtggggcgtcatcgccatagactttttgcatccacaacagcaggcccagccccggcgtactggtgcgcggatcctgataaatcacccgccagttttgatcgctctcaacaagctctttcaggctttgcggcggatttttcagtttgttcttgtcatagacgaaggcgaaatagccgtaatcaaacggtacgaaagtgtcattattccagccgccgggaacgttaacggcatccgctgccacgccgcttttggcaaatagtccggttttactggcggcgtctaacaggttgttatccagccccagcaccacatcggctttactgtttttgccttccatgcgcagacggttgagaagcgaaacgccatcttccagcgccaccagtttcagttcgcaattacagtcggcttcaaaggctttttttaccaccgggcctggcccccagttggcggcgaaggaatcgtaggtataaacagtcagaacgggtttagcgaaaacgggcgctgtgcacagcaacagcaggggcagacatttttttaacactttgcacctcaaaaaagagtggcaaaggacttgagaaggagcctcaaatcccttcgccggcgttatccggatcaggttcgacgggtattttctcagcgcacgcgtctgcgtggcaccccgttgagaacggcgttagtgtagtgattttgttatcaaccagcaatcatggatccggtggcgcaaaccacgctgatttaaaatcgaaccagccgagggtattcatgcgcaggccgcgcatactgcgttgcccctgaatgatcagccagtggtggataagcggcaccattgctttactggcgaccagttgctggcaccagttcgccaggttcatttcgccattgcgccagcgggcggcgtcggcttgccagtcgatcggaatacagtgttggagcagcggcacctcgcacaagtgcgcgaacagcgaaaaatccagcggcagcgtaaagttggcgctattaagccagatatcgctctcgatctctccttcatgccactgatcgtagctgatctctttgatttccagcgtgacctggtgacttgccagaatctgctgcatgatcccggcaatcacccgatgctcactgtgatcctgataaaaggtcagggtgaggctttccaggccagccggtttttcgctctttatggtgcgggcatggtgccaacgggggagcagtccataagccgggaaccacagttgctggtactgttcctcagcgaaatagaccagattagttggagaaagcacatagcttacccagtccctgacttgctgattcgccccgcgatgggtgcggctgtcgaacagtaaatagtagcaaccttcctccaggcggctttcaatctctttttcctcgccctgtggaccttttagcatcagacctccagctggctcgtcggcaatttccggcagaacccagacgttaacttcatcgattaatgcccggtaaccgaagaagtcatcgaatgcctgaattttcagttgattggtggtgttgcggatcaccgcatacggaccggtgccgatgggatggctggcaaagttactgagggtttcccattcgcgcggcaggatcatcgccggaacttgtcccagcagtaacggtaaccagcggtccggttgcgtgagatggatatccagcgtccagggcgtcggcgacacaatgtccgcaatatgcgaatagagcggcagcgtattgattcgttttaaagaggcgatcacgtcgtccatttccagttcacgaccatgatgaaaatggactcctggacgcaaaaagaaacgccagtgaagcggtgatatttgctgccagtggtgggcgatgtctgcttccagttccccattttcctcatttatgcgcgttagcgaactgaagatttgccgggcaatatgggtttcggaacggcgcaatgcgctgccaggtagcagattacgcaacggacgatagtagagcacgcgcaggatgtgccgcccctggcggaagctgcggcccagatgagaaaccagcatttgccgcacagtcgctttgtcgccaaccaactgcactagttggtcgatacgatcctgctccagcaggtcttccgcccgctgttgctgaagcgccagcccggtatagaggaatgtcagacgcgagcgtttaccgcgcccgacttccgcttcccacgtcagccagccgcgatcctgcatggtgttgagcagggtacgcatatgacgacgcgagcagctcaataacgctgccagttcgttgagcgttgtgtcctgcgatttaccctcgcagcattgccacaggcggatgaactgttgttgcagacgagcagatggcataaaaggggaactcctgcgcaaaagacagcaattttattttccctatattaagtcaataattcctaacgatgaagcaaggaggtgccccatgcgtcagttttatcagcactattttaccgcgacagcgaagttgtgctggttgcgttggttaagcgtcccacaacgattaaccatgcttgaaggactgatgcagtgggatgaccgcaattctgaaagttgacttgcctgcatcatgtgtgactgagtattggtgtaaaatcacccgccagcagattatacctgctggtttttttattctcgccgcgctaaaaagggaacgtatgatctggataatgacgatggctcgccgtatgaacggtgtttacgcggcatttatgctggtcgcttttatgatgggggtggccggggcgctacaggctcctacattgagcttatttctgagtcgtgaggttggcgcgcaacctttctggatcggactcttttatacggtgaatgctattgctgggatcggcgtaagcctctggttggcaaaacgttctgacagtcagggcgatcggcgaaaactgattatattttgctgtttgatggctatcggcaatgcgctattgtttgcatttaatcgtcattatctgacgcttatcacctgtggtgtgcttctggcatctctggccaatacggcaatgccacagttatttgctctggcgcgggaatatgcggataactcggcgcgagaagtggtgatgtttagctcggtgatgcgtgcgcagctttctctggcatgggttatcggtccaccgttggcctttatgctggcgttgaattacggctttacggtgatgttttcgattgccgccgggatattcacactcagtctggtattgattgcatttatgcttccgtctgtggcgcgggtagaactgccgtcggaaaatgctttatcaatgcaaggtggctggcaggatagtaacgtacggatgttatttgtcgcctcgacgttaatgtggacctgcaacaccatgtacattattgatatgccgttgtggatcagtagcgagttaggattgccagacaaactggcgggtttcctgatggggacggcagctggactggaaataccagcaatgattctggctggctactatgtcaaacgttatggtaagcggcgaatgatggtcatagcagtggcggcaggagtactgttttacaccggattgattttctttcatagccgtatggcgttgatgacgctgcaactttttaacgctgtatttatcggcattgttgcgggtattgggatgctatggtttcaggatttaatgcctggaagagcgggggcagctaccaccttatttactaacagtatttctaccggggtaattctggctggcgttattcagggagcaattgcacaaagttgggggcactttgctgtctactgggtaattgcggttatttctgttgtcgcattatttttaaccgcaaaggttaaagacgtttgatgacgtggacgatagcggaaagcccggtcatttgaccgggcaaggggattaattcataaacgcaggttgttttgcttcataagcggcaatggcgtcgtcgtgctgcaaggtaagcccaatactgtccagaccgttcatcatgcagtggcggcggaaggcatcgatggtaaagcgataggttttctctcccgctttcacctcttgcgcttccagatccacgtcgaaatggatccccggattggctttcaccagcgcaaacagttcgtccacttctgcatcgcttaatttcaccggcagcagctggttgttaaagctattgccgtagaagatgtcagcaaaactcggcgcaatcaccactttaaaaccgtagtcggtcaatgcccagggcgcgtgctcacgcgaggagccacagccgaagttttctcgtgccagcaaaatggaagcgccctgatactgcgggaagttcagcacgaagtccgggtttggctgttggcctttttcatcgagaaaacgccagtcgttaaacagatgcgcgccaaaacccgtacgggtcactttctgcaaaaactgtttcgggatgattgcatcggtatcgacattggcggcatccagcggaaccaccaggcctgtgtgtttgataaatttctctgccatggtgtgctccttatttaatgttgcgaatgtcggcgaaatgtccggtcacagcagcagcggcagccattgccgggctgaccagatgcgtgcgcccgccgcgcccctggcggccttcaaagttacggttgctggtggatgcacaacgttcgcccggattcagacggtcgttgttcatcgccagacacattgagcagccaggcaagcgccattcaaaaccggcttcaataaagattttatccagaccttccgcttccgcctgggcttttaccgggccagagccgggaaccaccagtgcctgcacgcctggcgcgacttttcgccctttggcgatctccgctgccgcgcgtaaatcttcaatgcgcgagttggtacaggaaccgataaacactttgtcgatagccacttcggtcagcggaatgcccggtttcagccccatataggccagcgctttttctgccgacgcgcgttcaaccggatcggcaaacgaagccggatcgggaatattgtcgttcacggaaatcacctggccgggattggtgccccaggtgacctgcggtgaaatttcttctgcttgcagagtgacaacggtatcgaaagttgcgccttcgtcggtttgcagggttttccagtaggcaacggcgtcgtcgaaatctttgcctttcggcgcatgcagacggcctttgacatagttaaaggtggtttcgtccggtgcaaccagaccggcttttgcgcccatttcgattgccatattgcacagggtcatacgaccttccatgcttaaatcacggattgcttcgccgcaaaactccaccacatgcccggtgccgcctgcgctaccggttttaccgataattgccagcacgatatcttttgcggtaatgcccggcgcggctttgccctggacttcaattttcatggtttttgcgcggccctgtttcagggtttgcgttgccagtacgtgttcaacttcggaagtgccgataccaaaggccagtgcgccaaacgcgccgtgggtggcggtatgcgagtcgccgcagacaatggtcatccccggcaaggtgacgccctgttccggccccattacgtggacgatcccctgatacgggtgattcaggtcatacagttcgacgccaaattctttgcagtttttgatcagttcctgcatctggatacgcgccatttcaccgcaggcattaatgtctttggtctgggtagagacgttgtgatccatggtagcgaaggttttgcccggctgacgtaccgggcgaccgtgggtgcgcagaccatcgaacgcctgcggtgaggtcacttcatgcaccaggtggcggtcgatatataacagtggggtttcgttttcggcttcgtacacaacgtgagcgtcgaacaatttttcgtataacgtcttagccatgattacaccccttctgctacatagcgggcaatgatatcgcccatttcatcggtactaacggcggcagcgccacgggctaaatccccggtgcgaatgccttcttctaatgcgcggttaatggcgcgttcaatggcgcaagccgcatcatcggcatccaggctgtaacgcagcagcagtgccagcgaaaggatttgtgcaatcgggttggcgatgtttttgcctgcgatatctggtgccgagccgcccgccggttcatacagtccaaaaccttgctcgttcaggctggcggaaggcaacatccccatcgagccagtgatcattgcgcactcgtcagacagaatgtcgccaaacaggttggagcacagcagaacgtcaaactgtgatggatctttaatcagctgcatggtggcgttgtcgatgtacatatgcgccagttcgacatccgggtattccgtggcgatctcgttaacgatctcccgccataaaatagaggattgcagcacgttggctttatcgatcgacgtcactttgtggcgacgcttgcgagcagattcaaacgcgatgcgggcgatacgttcgatctcaaaacggtgatacacctcggtatcaaaggctttttcatattgtccgctaccttcgcggccttttggctgaccgaaatagatgccgccggtcagttcgcgcacacacaggatgtcgaagccgtttgcggcaatgtctgcacgcagcggacagaatgcttccagcccctgatacagttttgccgggcgcaggttgctgaataatttgaagtgcttacgcagaggcagcagcgcgccgcgttctggttgctggtctggtggtaaatgttcccacttcgggccgcctaccgagccaaacagcacggcatcggcttgctcacaaccttcaaccgtcgcaggcggcagcggctgcccgtggttatcaatggctgcgccgcctacatcgtaatggctggtggtgatgcgcatcgcaaagcggttgcgcacggcatccagcactttcagcgcctgggtcatcacttccggaccaataccgtcccccggcaatacggcaatatggtaattcttcgacatcacacggtttccttgttgttttcgttgtgttgagctttgcgttgcaactctttttcgacttctgcggcgcgccagatattgttcagtacgtgcaccatggctttggcggaggactcgacaatatcggtggccaggccgacgccgtggaagcggcgaccgttgtagttggcgacaatatccacctgacccagagcatctttaccgtgacctttagcagtcaggctgtatttcaccagttcgacgttatagtcagtgatgcggttaattgcctgatagacggcatcgaccggaccgttaccgttggcggcttctgctttgacttcttcgccacaggccagtttgacggcggcggtggcgatatcgttagagccagactgcacgctgaagtaatccagacggaaatgctccggctcttcttgctgcttaccgatgaaggccagcgcctccagatcgtaatcaaacacctgaccttttttgtccgccagcttcaggaaagcatcgtacaaattgtctaaattatattcactttctttatacccnatctcatccatgcgatgtttcaccgccgcacgccccgaacgagaggtcagattcagctggatttggttcagaccaatagattctggtgtcatgatttcgtagttttcgcggtttttcagcacgccatcctggtggataccggaggagtgagcgaatgcgccgctgccaacaatggctttgtttgccgggatcggcatattacaaatctggctaactaactggctggtgcgccatatctcctggtgattaatggcggtgtggacgttgagaatatccttacgaactttaatcgccatgatgacttcttccagcgaacagttaccggcacgctcgccgatcccgttcattgcaccttccacctggcgtgcaccggcatgtaccgccgccagtgagttgccgaccgccaggcctaaatcgtcgtgggtatgtacggaaataatggctttgtcgatgttaggtacgcgttcatacaggccgctgatgattccggcgaactcaaacggcatggtgtagcccacggtgtccggaatgttgatggtggtggcaccggcattaatcgccgcttcgaccactcgcgccagatcggcaatgggtgtacgcccggcatcttcgcaagaaaattcaacatcatcggtgtaattacgggcgcgtttcaccatatagatagcgcgttcgatcacttcatccagcgtgctgcgcagcttggtggcgatgtgcattggcgaagtggcaataaaggtatgaatacggaaggcttcggcgactttcagggattcggccgccacgtcgatatctttctccacgcagcgagctaacgcacatacgcggctgtttttaacctggcgggcgatggtttgcaccgattcaaaatcgcccggcgaagagacggggaaaccgacttccatcacgtcaacacccatacgctcaagggccagcgcaatttgcagtttttctttcacactcaagcttgcctgtaacgcctgttcaccgtcgcgcaatgtggtatcgaaaataatgacttgctggctcatggtttgggtccttgtctcttttagagcgcctcgcttcgggcataaaaaaacccgcgcaatggcgcgggttttttgtttgactgcgtgctggcttaatgctggatgccgctcactcgtctaccgcgcaaagaagatgcgtttagtagtagtagaccgataaagcgaacgatgtgagtcattaaatcagctccagatgaatgcgatatgcttttagagttactggatacaaaaacggatgtcaaccctgacgcaataaaaacgtcccgccagcgtgagttctgcacccgtaaaattagctaattgtgctgcggtggttaaagtaagcgatattaatttctgcttaactaccgacgcttttcatcggttgacatatttcagcataaatttttgcatctaatcaacgaggaaaaaggggacaaaatgcacgcgttgcaaaacctatcctgatgatttgtattgaattatatgttttgcgattttttttgatattgatttggtgaatattattgatcaattaatgttaagaattaatgcattaaatatataaattaattattaaataagcacatttaatccattttgtagatgattgagtattcgcggtagttatgattagattgttttcgcaacaaaaacattatggattattatgctgtggtaaatgactcattccacggcaatggattctgtttttatcagaacccgtatctttatgttttccgaattttactcattttgctttttcttattttatatgcatgataaatcatattcttcaggattatttctctgcattccaataagggaaagggagttaagtgtgacagtggagttaagtatgccagaggtacaaacagatcattcagagacggcggagttaagcaagccacagctacgcatggtcgatctcaacttattaaccgttttcgatgccgtgatgcaggagcaaaacattacccgtgccgctcatgttctgggtatgtcgcaacctgcggtcagtaacgctgttgcacgcctgaaggtgatgtttaatgacgagctttttgttcgttatggccgtggtattcaaccgactgctcgcgcatttcaactttttggctcagttcgtcaggcattgcaactagtacaaaatgaattgcctggttcaggttttgaacccgcgagcagtgaacgtgtatttcatctttgtgtttgcagcccgttagacagcattctgacctcgcagatttataatcacattgagcagattgcgccaaatatacatgttatgttcaagtcttcattaaatcagaacactgaacatcagctgcgttatcaggaaacggagtttgtgattagttatgaagacttccatcgtcctgaatttaccagcgtgccattatttaaagatgaaatggtgctggtagccagcaaaaatcatccaacaattaagggcccgttactgaaacatgatgtttataacgaacaacatgcggcggtttcgctcgatcgtttcgcgtcatttagtcaaccttggtatgacacggtagataagcaagccagtatcgcgtatcagggcatggcaatgatgagcgtacttagcgtggtgtcgcaaacgcatttggtcgctattgcgccgcgttggctggctgaagagttcgctgaatccttagaattacaggtattaccgctgccgttaaaacaaaatagcagaacctgttatctctcctggcatgaagctgccgggcgcgataaaggccatcagtggatggaagagcaattagtctcaatttgcaaacgctaactgaatgcagaataggtcaggcatgaatgtctggtttattctgtattttttattgaatgtagaattttattctgaatgtgtgggctctctgttttaggattaattaaaaaatagagaaattgctgtaagttgtgggattcagccgatttattatcaatttaatccttcgtaatggaggattttatcgtttcttttcacctttcctcctgtttattcttattaccctgcgtttatgtctctggctgccaattgcttaagcaagatcggacggttaatgtgttttacacattttttccgtcaaacagtgaggcaggccatggagatgttgtctggagccgagatggtcgtccgatcgcttatcgatcagggcgttaaacaagtattcggttatcccggaggcgcagtccttgatatttacgatgcattgcataccgtgggtggtatcgatcatgttttagttcgtcatgagcaggcggcagtgcatatggccgatggtctggcgcgcgcgaccggggaagtcggcgtcgtgctggtaacgtcgggtccaggggcgaccaatgcgattaccggcatcgccaccgcttatatggattccattccattagttgtcctttccgggcaggtagcgacctcgttgataggttacgatgcctttcaggagtgcgacatggtggggatttcgcgaccggtggttaaacacagttttctggttaagcaaacggaagacattccgcaggtgctgaaaaaggctttctggctggcggcaagtggtcgcccaggaccagtggtcgttgatttaccgaaagatattcttaatccggcgaacaaattaccctatgtctggcctgagtcggtcagtatgcgttcttacaatcccactactaccggacataaagggcaaattaagcgcgctctgcaaacgctggtagcggcaaaaaaaccggttgtctacgtaggcggtggggcaatcatggcgggctgccatcagcagttgaaagaaacggtggaggcgttgaatctgcccgttgtttcctcattgatggggctgggggcgtttccggcaacgcatcgtcaggcgctgggcatgctgggaatgcacggtacctacgaagccaatatgacgatgcataacgcggatgtgattttcgccgtcggggtacgatttgatgaccgaacgacgaacaatctggcaaagtactgcccaaatgccactgttctgcatatcgatattgatcctacttccatttctaaaaccgtgactgcggatatcccgattgtgggggatgctcgccaggtcctcgaacaaatgcttgaactcttgtcgcaagaatccgcccatcaaccactggatgagatccgcgactggtggcagcaaattgaacagtggcgcgctcgtcagtgcctgaaatatgacactcacagtgaaaagattaaaccgcaggcggtgatcgagactctttggcggttgacgaagggagacgcttacgtgacgtccgatgtcgggcagcaccagatgtttgctgcactttattatccattcgacaaaccgcgtcgctggatcaattccggtggcctcggcacgatgggttttggtttacctgcggcactgggcgtcaaaatggcgttgccagaagaaaccgtggtttgcgtcactggcgacggcagtattcagatgaacatccaggaactgtctaccgcgttgcaatacgagttgccggtactggtggtgaatctcaataaccgctatctggggatggtgaaacagtggcaggacatgatctattccggccgtcattcacaatcttatatgcaatcactacccgatttcgtccgtctggcggaagcctatggtcacgtcgggatccagatctctcatccgcatgagctggaaagcaaacttagcgaggcgctggaacaggtgtgcaataatcgcctggtgtttgttgatgttaccgtcgatggcagtgagcacgtctacccgatgcagattcgcgggggcggaatggatgaaatgtggttaagcaaaacggagagaacctgattatgcgccggatattatcagtcttactcgaaaatgaatcaggcgcgttatcccgcgtgattggccttttttcccagcgtggctacaacattgaaagcctgaccgttgcgccaaccgacgatccgacattatcgcgtatgaccatccagaccgtgggcgatgaaaaagtgcttgagcagatcgaaaagcaattacacaagctggtcgatgtcttgcgcgtgagtgagttggggcagggcgcgcatgttgagcgggaaatcatgctggtgaaaattcaggccagcggttacgggcgtgacgaagtgaaacgtaatacggaaatattccgtgggcaaattatcgatgtcaccccctcgctttataccgttcaattagcaggcaccagcgataagcttgatgcatttttagcatcgattcgcgatgtggcgaaaattgtggaagttgctcgctctggtgtggtcggactttcgcgcggcgataaaataatgcgttgagaatgatctcagtgcgcaatttgcagcccaacatgtcacgttgggctttttttgcgaaatcagtgggaacctggaataaaagcagttgccgcagttaattttctgcgcttagatgttaatgaatttaacccataccagtacaatggctatggtttttacattttacgcaaggggcaattgtgaaactggatgaaatcgctcggctggcgggagtgtcgcggaccactgcaagctatgttattaacggcaaagcgaagcaataccgtgtgagcgacaaaaccgttgaaaaagtcatggctgtggtgcgtgagcacaattaccacccgaacgccgtggcagctgggcttcgtgctggacgcacacgttctattggtcttgtgatccccgatctggagaacaccagctatacccgcatcgctaactatcttgagcgccaggcgcggcaacggggttatcaactgctgattgcctgctcagaagatcagccagacaacgaaatgcgctgcattgagcaccttttacagcgtcaggttgatgccattattgtttcgacgtcgttgccacctgagcatcctttttatcaacgctgggctaacgacccgttcccgattgtcgcgctggaccgcgccctcgatcgtgaacatttcaccagcgtggttggtgccgatcaggatgatgccgaaatgctggcggaagagttacgtaagtttcccgccgagacggtgctttatcttggcgcgctgccggagctttctgtcagcttcctgcgtgaacaaggtttccgtactgcctggaaagatgatccgcgcgaagtgcatttcctgtatgccaacagctatgagcgggaggcggctgcccagttattcgaaaaatggctggaaacgcatccgatgccgcaggcgctgttcacaacgtcgtttgcgttgttgcaaggggtgatggatgtcacgctacgtcgcgatggtaaactgccttctgacctggcaattgccacctttggcgataacgaactgctcgacttcttacagtgcccggtgctggcagtggctcaacgtcaccgcgatgtcgcagagcgtgtgctggagattgtcctggcaagcctggacgaaccgcgtaagccaaaacctggtttaacgcgcattaaacgtaatctctatcgccgcggtgtgctcagccgtagctaagccgcgaacaaaaatacgcgccaggtgaatttccctctggcgcgtagagtacgggaatggacatcaatatccttaaagtaaataagactattcctgactattattgataagttcttttaaacccgcccgttaattaactcaccagctgaaattcacaataattaagtgatatcgacagcgcgtttttgcattattttgttacatgcagagatgaattgccgatttaacaagcacttttctttgcttttgcgcaaacccgctggcatcaagcgccacacagacgcaacagggactgttaaccggggaagatatgtcctaaaatgccgctcgcgtcgcaaactgacactttatatttgctgtggaaaatagtgagtcattttaaaacggtgatgacgatgagggattttttcttacagctattcataacgttaatttgctgcgcacgttggacgtaaaataaacaacgctgatattagccgtaaacatcgggttttttacctcggtatgccttgtgactggcttgacaagcttttcctccgctccgtaaactcctttcagtgggaaattgtggggcaaagtgggaataaggggtgaggctggcatgttccggggagcaacgttagtcaatctcgacagcaaagggcgcttatcagtgcctacccgttaccgggaacagctgcttgagaacgctgccggtcaaatggtttgcaccattgacattcatcacccgtgcctgctgctttaccccctgcctgaatgggaaattatcgagcaaaaattatcgcgtctgtcgagcatgaacccggttgagcgccgtgtgcagcgcctactgttaggtcatgccagcgaatgtcagatggatggcgcaggtcgattgttaatcgcgccagtactgcggcaacatgccgggctgacaaaagaagtgatgctggttggacagttcaacaagtttgagctgtgggatgaaacaacctggcatcaacaggtcaaggaagatatcgacgcagagcagttggctaccggagacttatcggagcgactgcaggacttgtctctataaaatgatggaaaactataaacatactacggtgctgctggatgaagccgttaatggcctcaatatccgtcctgatggcatctacattgatgggacttttggtcgcggtggtcactcacgtctgatcctctcgcagcttggcgaagaggggcgtttgctggcgatcgatcgcgacccgcaggctatcgccgttgcgaagactattgatgatccgcgcttctccatcatccacggacctttctccgcgctgggcgaatacgttgccgagcgcgatcttatcggcaagatcgacggcattctcctcgatcttggcgtctcttcaccgcaacttgatgatgctgagcgcggcttttcctttatgcgcgatggtccgctggacatgcgtatggacccaacccgtgggcagtcagccgctgaatggctacaaaccgcagaagaagccgatatcgcctgggtattgaaaacctatggtgaagagcgttttgccaaacgcattgcccgcgccattgtcgagcgtaaccgcgaacagccgatgacccgcaccaaagaactggcggaagtcgtggctgctgcaacgccggtgaaagataagtttaaacatcccgcgactcgtaccttccaggcggtgcgcatttgggtaaacagtgaactggaggagatagagcaggcgctaaaaagctcgctcaacgtgctggccccgggtgggcggctttcgatcatcagcttccactcgctggaagaccgtattgtgaaacgttttatgcgtgaaaacagccgcggtccgcaagttccggcagggttaccgatgactgaagagcagctcaaaaaactgggtggccgtcagctgcgagcattaggcaagttaatgccgggcgaagaagaggtggctgagaatcctcgtgcccgtagttcagttctgcgtatcgcagagaggacgaacgcatgatcagcagagtgacagaagctctaagcaaagttaaaggatcgatgggaagccacgagcgccatgcattgcctggtgttatcggtgacgatcttttgcgatttgggaagctgccactctgcctgttcatttgcattattttgacggcggtgaccgtggtaaccacggcgcaccatacccgtttactgaccgctcagcgcgaacaactggtgctggagcgagatgctttagacattgaatggcgcaacctgatccttgaagagaatgcgctcggcgaccatagccgggtggaaaggatcgccacggaaaagctgcaaatgcagcatgttgatccgtcacaagaaaatatcgtagtgcaaaaataaggataaacgcgacgcatgaaagcagcggcgaaaacgcagaaaccaaaacgtcaggaagaacatgccaactttattagttggcgttttgcgttgttatgcggctgtattctcctggcgctggcttttctgctcggacgcgtagcgtggttacaagttatctccccggatatgctggtgaaagagggcgacatgcgttctcttcgcgttcagcaagtttccacctcccgcggcatgattactgaccgttctggtcgcccgttagcggtgagcgtgccggtaaaagcgatttgggctgacccgaaagaagtgcatgacgctggcggtatcagcgtcggtgaccgctggaaggcgctggctaacgcgctcaatattccgctggatcagctttcagcccgcattaacgccaacccgaaagggcgctttatttatctggcgcgtcaggtgaaccctgacatggcggactacatcaaaaaactgaaactgccggggattcatctgcgtgaagagtctcgccgttactatccgtccggcgaagtgactgctcacctcatcggctttactaacgtcgatagtcaagggattgagggcgttgagaagagtttcgataaatggcttaccgggcagccgggtgagcgcattgtgcgtaaagaccgctatggtcgcgtaattgaagatatttcttctactgacagccaggcagcgcacaacctggcgctgagtattgatgaacgcctgcaggcgctggtttatcgcgaactgaacaacgcggtggcctttaacaaggctgaatctggtagcgccgtgctggtggatgtcaacaccggtgaagtgctggcgatggctaacagcccgtcatacaaccctaacaatctgagcggcacgccgaaagaggcgatgcgtaaccgtaccatcaccgacgtgtttgaaccgggctcaacggttaaaccgatggtggtaatgaccgcgttgcaacgtggcgtggtgcgggaaaactcggtactcaataccattccttatcgaattaacggccacgaaatcaaagacgtggcacgctacagcgaattaaccctgaccggggtattacagaagtcgagtaacgtcggtgtttccaagctggcgttagcgatgccgtcctcagcgttagtagatacttactcacgttttggactgggaaaagcgaccaatttggggttggtcggagaacgcagtggcttatatcctcaaaaacaacggtggtctgacatagagagggccaccttctctttcggctacgggctaatggtaacaccgttacagttagcgcgagtctacgcaactatcggcagctacggcatttatcgcccactgtcgattaccaaagttgaccccccggttcccggtgaacgtgtcttcccggaatccattgtccgcactgtggtgcatatgatggaaagcgtggcgctaccaggcggcggcggcgtgaaggcggcgattaaaggctatcgtatcgccattaaaaccggtaccgcgaaaaaggtcgggccggacggtcgctacatcaataaatatattgcttataccgcaggcgttgcgcctgcgagtcagccgcgcttcgcgctggttgttgttatcaacgatccgcaggcgggtaaatactacggcggcgccgtttccgcgccggtctttggtgccatcatgggcggcgtattgcgtaccatgaacatcgagccggatgcgctgacaacgggcgataaaaatgaatttgtgattaatcaaggcgaggggacaggtggcagatcgtaatttgcgcgaccttcttgctccgtgggtgccagacgcaccttcgcgagcactgcgagagatgacactcgacagccgtgtggctgcggcgggcgatctctttgtagctgtagtaggtcatcaggcggacgggcgtcgatatatcccgcaggcgatagcgcaaggtgtggctgccattattgcagaggcgaaagatgaggcgaccgacggtgaaatccgtgaaatgcacggcgtaccggtcatctatctcagccagctcaacgagcgtttatctgcactggcgggccgcttttaccatgaaccctctgacaatttacgtctcgtaggcgtaacgggcaccaacggcaaaaccacgactacccagctgctggcgcagtggagccaactgcttggcgaaaccagcgcggtaatgggcaccgttggtaacggtctgcttgggaaagtgatcccgacagaaaatactaccggttccgcagtcgatgttcagcatgagctggcggggctggtggagcagggcgcgacgttttgcgcaatggaagtttcctcccacgggctggtacagcaccgtgtggcggcattgaaatttgcggcgtcggtctttaccaacttaagccgcgatcaccttgattatcatggtgatatggaacactacgaagctgcgaaatggctgctttattctgaacatcattgcggtcaggcgattattaacgccgacgatgaagtgggccgccgctggctggcaaaactgccggacgcggttgcggtatcaatggaagatcatatcaatccgaactgtcacggacgctggttaaaagcgatcgacgtgaactatcacgacagcggtgcgacgattcgctttagctcaagttggggcgatggcgaaattgaaagccatctgatgggcgcttttaacgtcagcaacctgctgctcgcgctggcgacactgctggcactcggctatccactggctgatctgctgaaaaccgccgcgcgtctgcaaccggtttgcggacgtatggaagtgttcactgcgccaggcaaaccgacggtggtggtggattacgcgcatacgccggatgcactggaaaaagccttacaggcggcgcgcctgcactgtgcgggcaagctgtggtgcgtctttggctgtggtggcgatcgcgataaaggtaagcgtccactgatgggcgcaattgccgaagagtttgctgacgtggcggtggtgacggacgataacccgcgtaccgaagaaccgcgtgccatcatcaacgatattctggcgggaatgttagatgccggacatgccaaagtgatggaaggccgtgctgaagcggtgacttgcgccgttatgcaggctaaagagaatgatgtggtactggtcgcgggcaaaggccatgaagattaccagattgttggcaatcagcgtctggactactccgatcgcgtcacggtggcgcgtctgctgggggtgattgcatgattagcgtaacccttagccaacttaccgacattctcaacggtgaactgcaaggtgcagatatcacccttgatgctgtaaccactgatacccgaaaactgacgccgggctgcctgtttgttgccctgaaaggcgaacgttttgatgcccacgattttgccgaccaggcgaaagctggcggcgcaggcgcactactggttagccgtccgctggacatcgacctgccgcagttaatcgtcaaggatacgcgtctggcgtttggtgaactggctgcatgggttcgccagcaagttccggcgcgcgtggttgctctgacggggtcctccggcaaaacctccgttaaagagatgacggcggcgattttaagccagtgcggcaacacgctttatacggcaggcaatctcaacaacgacatcggtgtaccgatgacgctgttgcgcttaacgccggaatacgattacgcagttattgaacttggcgcgaaccatcagggcgaaatagcctggactgtgagtctgactcgcccggaagctgcgctggtcaacaacctggcagcggcgcatctggaaggttttggctcgcttgcgggtgtcgcgaaagcgaaaggtgaaatctttagcggcctgccggaaaacggtatcgccattatgaacgccgacaacaacgactggctgaactggcagagcgtaattggctcacgcaaagtgtggcgtttctcacccaatgccgccaacagcgatttcaccgccaccaatatccatgtgacctcgcacggtacggaatttaccctacaaaccccaaccggtagcgtcgatgttctgctgccgttgccggggcgtcacaatattgcgaatgcgctggcagccgctgcgctctccatgtccgtgggcgcaacgcttgatgctatcaaagcggggctggcaaatctgaaagctgttccaggccgtctgttccccatccaactggcagaaaaccagttgctgctcgacgactcctacaacgccaatgtcggttcaatgaccgccgctgttcaggtactggctgaaatgccgggctaccgcgtgctggtggtgggcgatatggcggaactgggcgctgaaagcgaagcctgccatgtacaggtgggcgaggcggcaaaagctgctggtattgaccgcgtgttaagcgtgggtaaacaaagccatgctatcagcaccgccagcggcgttggcgaacattttgctgataaaactgcgttaattacgcgtcttaaatcactgattgctgagcaacaggtaattacgattttagttaagggttcacgtagtgccgccatggaagaggtagtacgcgctttacaggagaatgggacatgttagtttggctggccgaacatttggtcaaatattattccggctttaacgtcttttcctatctgacgtttcgcgccatcgtcagcctgctgaccgcgctgttcatctcattgtggatgggcccgcgtatgattgctcatttgcaaaaactttcctttggtcaggtggtgcgtaacgacggtcctgaatcacacttcagcaagcgcggtacgccgaccatgggcgggattatgatcctgacggcgattgtgatctccgtactgctgtgggcttacccgtccaatccgtacgtctggtgcgtgttggtggtgctggtaggttacggtgttattggctttgttgatgattatcgcaaagtggtgcgtaaagacaccaaagggttgatcgctcgttggaagtatttctggatgtcggtcattgcgctgggtgtcgccttcgccctgtaccttgccggcaaagacacgcccgcaacgcagctggtggtcccattctttaaagatgtgatgccgcagctggggctgttctacattctgctggcttacttcgtcattgtgggtactggcaacgcggtaaacctgaccgatggtctcgacggcctggcaattatgccgaccgtatttgtcgccggtggttttgcgctggtggcgtgggcgaccggcaacatgaactttgccagctatttacacataccgtatctgcgacacgccggggaactggtcattgtctgcacggcgatagtcggggcaggactgggcttcctgtggtttaacacctatccggcgcaggtctttatgggcgatgtaggttcgctggcgttaggtggtgcgttaggcattatcgccgtactgctacgtcaggaattcctgctggtgattatggggggcgtgttcgtggtagaaacgctttctgtcatcctgcaggtcggctcctttaaactgcgcggacaacgtattttccgcatggcaccgattcatcaccactatgaactgaaaggctggccggaaccgcgcgtcattgtgcgtttctggattatttcgctgatgctggttctgattggtctggcaacgctgaaggtacgttaatcatggctgattatcagggtaaaaatgtcgtcattatcggcctgggcctcaccgggctttcctgcgtggactttttcctcgctcgcggtgtgacgccgcgcgttatggatacgcgtatgacaccgcctggcctggataaattacccgaagccgtagaacgccacacgggcagtctgaatgatgaatggctgatggcggcagatctgattgtcgccagtcccggtattgcactggcgcatccatccttaagcgctgccgctgatgccggaatcgaaatcgttggcgatatcgagctgttctgtcgcgaagcacaagcaccgattgtggcgattaccggttctaacggcaaaagcacggtcaccacgctagtgggtgaaatggctaaagcggcgggggttaacgttggtgtgggtggcaatattggcctgccagcgttgatgctgcttgatgctgagtgcgaactgtacgtgctggaactgtcgagcttccagctggaaaccacctccagcttacaggcggtagcagcgaccattctgaacgtgactgaagatcatatggatcgctatccgtttggtttacaacagtatcgtgcagcaaaactgcgcatttacgaaaacgcgaaagtttgcgtggttaatgctgatgatgccttaacaatgccgattcgcggtgcggatgaacgctgcgtcagctttggcgtcaacatgggtgactatcacctgaatcatcagcagggcgaaacctggctgcgggttaaaggcgagaaagtgctgaatgtgaaagagatgaaactttccgggcagcataactacaccaatgcgctggcagcactggcactggcagacgcagctggtttgccgcgcgccagcagcctgaaagcgttaaccaccttcaccggtctgccgcatcgctttgaagtggtgctggagcacaatggcgtacgctggattaacgattcgaaagccactaacgtcggcagtacggaagcggcgttgaatggcttgcaggtagacggcacgctgcatttgttgctgggcggcgatggtaaatcggcggacttcagtccactggcgcgctatctgaatggcgacaacgtgcgtttgtactgttttggtcgtgacggtgcgcagctggcggcgctacgcccggaagtggcagaacaaaccgaaactatggaacaggcgatgcgcttgctggctccgcgtgttcagccgggcgatatggttctgctctccccggcctgtgccagccttgatcagttcaagaactttgaacaacgaggcaatgagtttgcccgtctggcgaaggagttaggttgatgcgtttatctctccctcgcctgaaaatgccgcgcctgccaggattcagtatcctggtctggatctccacggcgctaaaaggctgggtgatgggctcgcgggaaaagataccgacagcctgatcatgtacgatcgcaccttactgtggctgaccttcggccttgcggcgattggctttatcatggtgacctcggcgtcaatgcccatagggcaacgcttaaccaacgatccgttcttcttcgcgaagcgtgatggcgtctatctgatcctggcattcattctggcgatcattacgctgcgtctgccgatggagttctggcaacgctacagtgccacgatgctgctcggatctatcatcctgctgatgatcgtgctggtagtgggtagctcggttaaaggggcatcgcgttggatcgatctcggtttgctgcgtatccagcctgcggagctgacaaaactgtcgctgttttgttatatcgccaactatctggtgcgtaaaggcgacgaagtacgtaataacctgcgcggcttcctgaaaccgatgggcgtgattctggtgttggcagtgttactgctggcacagccagaccttggtacggtggtggtgttgtttgtgactacgctggcgatgttgttcctggcgggagcgaaattgtggcagttcattgccattatcggtatgggcatttcagcggttgtgttgctgatactcgccgaaccgtaccgtatccgccgtgttaccgcattctggaacccgtgggaagatccctttggcagcggctatcagttaacgcaatcgctgatggcgtttggtcgcggcgaactttggggacaaggtttaggtaactcggtacaaaaactggagtatctgccggaagcgcacactgactttattttcgccattatcggcgaagaactggggtatgtcggtgtggtgctggcacttttaatggtattcttcgtcgcttttcgcgcgatgtcgattggccgcaaagcgttagaaattgaccaccgtttttccggttttctcgcctgttctattggcatctggtttagcttccaggcgctggttaacgtaggcgcggcggcggggatgttaccgaccaaaggtctgacattgccgctgatcagttacggtggttcgagcttactgattatgtcgacagccatcatgatgctgttgcgtattgattatgaaacgcgtctggagaaagcgcaggcgtttgtacgaggttcacgatgagtggtcaaggaaagcgattaatggtgatggcaggcggaaccggtggacatgtattcccgggactggcggttgcgcaccatctaatggctcagggttggcaagttcgctggctggggactgccgaccgtatggaagcggacttagtgccaaaacatggcatcgaaattgatttcattcgtatctctggtctgcgtggaaaaggtataaaagcactgatagctgcgccgctgcgtatcttcaacgcctggcgtcaggcgcgggcgattatgaaagcgtacaaacctgacgtggtactcggtatgggcggctatgtatcaggtccaggtggtctggccgcgtggtcgttaggcattccggttgtacttcatgaacaaaacggtattgcgggcttaaccaataaatggctggcgaagattgccaccaaagtgatgcaggcgtttccaggcgctttccctaatgcggaagtggtgggtaacccggtgcgtaccgatgtgctggcgctgccgttgccgcagcaacgtttggctggacgtgaaggtccggttcgtgtgctggtagtgggtggttcccagggcgcacgcattcttaaccagacaatgccgcaggttgctgcgaaactgggtgattcagtcactatctggcatcagagcggtaaaggttcgcaacaatccgttgaacaggcgtatgccgaagcggggcaaccgcagcataaagtgacggaatttattgatgatatggcggcggcgtatgcgtgggcggatgtcgtcgtttgccgctccggtgctttaacggtgagtgaaatcgccgcggcaggactaccggcgttgtttgtgccgtttcaacataaagaccgccagcaatactggaatgcgctaccgctggaaaaagcgggcgcagccaaaattatcgagcagccacagcttagcgtggatgctgtcgccaacaccctggccgggtggtcgcgagaaaccttattaaccatggcagaacgcgcccgcgctgcatccattccggatgccaccgagcgagtggcaaatgaagtgagccgggctgcccgggcgtaattgtagcgatgccttttgcatcgtatgaatttaagaagttaatggcgtaaagaatgaatacacaacaattggcaaaactgcgttccatcgtgcccgaaatgcgtcgcgttcggcacatacattttgtcggcatcggtggtgccggtatgggcggtattgccgaagttctggccaatgaaggttatcagatcagtggttccgatttagcgccaaatccggtcacgcagcagttaatgaatctgggagcgacgatttatttcaaccatcgcccggaaaacgtacgtgatgccagcgtggtcgttgtttccagcgccatttctgccgataacccggaaattgtcgcagctcatgaagcgcgtattccggtgatccgtcgtgccgaaatgctggctgagttaatgcgttttcgtcatggcatcgccattgcaggaacgcacggcaaaacgacaaccaccgcgatggtttccagcatctacgcagaagcggggctcgacccaaccttcgttaacggcgggctggtaaaagcggcgggggttcatgcgcgtttggggcatggtcggtacctgattgccgaagcagatgagagtgatgcatcgttcctgcatctgcaaccgatggtggcgattgtcaccaatatcgaagccgaccacatggatacctaccagggcgactttgagaatttaaaacagacttttattaattttctgcacaacctgccgttttacggtcgtgcggtgatgtgtgttgatgatccggtgatccgcgaattgttaccgcgagtgggacgtcagaccacgacttacggcttcagcgaagatgccgacgtgcgtgtagaagattatcagcagattggcccgcaggggcactttacgctgctgcgccaggacaaagagccgatgcgcgtcaccctgaatgcgccaggtcgtcataacgcgctgaacgccgcagctgcggttgcggttgctacggaagagggaattgatgacgaggctattttacgtgcgctggagagcttccaggggactgggcgccgttttgatttcctcggtgaattcccgctggagccagtgaatggtaaaagcggtacggcaatgctggtcgatgactacggccaccacccgacggaagttgacgccaccattaaagcggcgcgcgcaggctggccggataaaaacctggtaatgctgtttcagccgcaccgttttacccgtacgcgcgacctgtatgatgatttcgccaatgtgctgacgcaggttgataccctgttgatgctggaagtgtatccggctggcgaagcgccaattccgggagcggacagccgttcgctgtgtcgcacaattcgtggacgtgggaaaattgatcccattctggtgccggaccctgcgcaggtagccgagatgctggcaccggtattaaccggtaacgacctgattctcgttcagggggctggtaatatcggaaaaattgcccgttctttagctgaaatcaaactgaagccgcaaactccggaggaagaacaacatgactgataaaatcgcggtcctgttgggcgggacttccgctgagcgggaagtttctctgaattctggcgcagcggtgttagccgggctgcgtgaaggcggtattgatgcgtatcctgtcgacccgaaagaagtcgacgtgacgcaactgaagtcgatgggttttcagaaagtgtttatcgcgctacacggtcgcggcggtgaagatggtacgctgcagggcatgctcgagctgatgggcttgccttataccggcagcggagtgatggcatctgcgctttcaatggataaactacgcagcaaactgctgtggcaaggtgccggtttaccggtcgctccgtgggttgcgttaacccgcgcagagtttgaaaaaggcctgagtgataagcagttagcagaaatttctgctctgggtttgccggttatcgttaagccgagccgcgaaggttccagtgtgggaatgtcaaaagtagtagcagaaaatgctctacaagatgcattaagattggcatttcagcacgatgaagaagtattgattgaaaaatggctaagtgggccggagttcacggttgcgatactcggtgaagaaattttaccgtcaatacgtattcaaccgtccggaaccttctatgattatgaggcgaagtatctctctgatgagacacagtatttctgccccgcaggtctggaagcgtcacaagaggccaatttgcaggaattagtgctgaaagcatggacgacgttaggttgcaaaggatggggacgtattgacgttatgctggacagcgatggacagttttatctgctggaagccaatacctcaccgggtatgaccagccacagcctggtgccgatggcggcacgtcaggcaggtatgagcttctcgcagttggtagtacgaattctggaactggcggactaatatgtcgcaggctgctctgaacacgcgaaacagcgaagaagaggtttcttctcgccgcaataatggaacgcgtctggcggggatccttttcctgctgaccgttttaacgacagtgttggtgagcggctgggtcgtgttgggctggatggaagatgcgcaacgcctgccgctctcaaagctggtgttgaccggtgaacgccattacacgcgtaatgacgatatccggcagtcgatcctggcattgggtgagccgggtacctttatgacccaggatgtcaacatcatccagacgcaaatagaacaacgcctgccgtggattaagcaggtgagcgtcagaaagcagtggcctgatgaattgaagattcatctggttgaatatgtgccgattgcgcggtggaatgatcaacacatggtagacgcggaaggaaacaccttcagcgtgccgccagatcgcaccagcaagcaggtgcttccaatgctgtatggcccggaaggcagcgccaatgaagtgttgcagggctatcgcgaaatggggcagatgctggcaaaggacagatttactctgaaggaagcggcgatgaccgcgcggcgttcctggcagttgacgctgaataacgatattaagctcaatcttggccggggcgatacgatgaaacgtttggctcgctttgtagaactttatccggttttacagcagcaggcgcaaaccgatggcaaacggattagctacgttgatttgcgttatgactctggagcggcagtaggctgggcgcccttgccgccagaggaatctactcagcaacaaaatcaggcacaggcagaacaacaatgatcaaggcgacggacagaaaactggtagtaggactggagattggtaccgcgaaggttgccgctttagtaggggaagttctgcccgacggtatggtcaatatcattggcgtgggcagctgcccgtcacgtggtatggataaaggcggggtgaacgacctcgaatccgtggtcaagtgcgtacaacgcgccattgaccaggcagaattgatggcagattgtcagatctcttcggtatatctggcgctttctggtaagcacatcagctgccagaatgaaattggtatggtgcctatttctgaagaagaagtgacgcaagaagatgtggaaaacgtcgtccataccgcgaaatcggtgcgtgtgcgcgatgagcatcgtgtgctgcatgtgatcccgcaagagtatgcgattgactatcaggaagggatcaagaatccggtaggactttcgggcgtgcggatgcaggcaaaagtgcacctgatcacatgtcacaacgatatggcgaaaaacatcgtcaaagcggttgaacgttgtgggctgaaagttgaccaactgatatttgccggactggcatcaagttattcggtattgacggaagatgaacgtgaactgggtgtctgcgtcgtcgatatcggtggtggtacaatggatatcgccgtttataccggtggggcattgcgccacactaaggtaattccttatgctggcaatgtcgtgaccagtgatatcgcttacgcctttggcacgccgccaagcgacgccgaagcgattaaagttcgccacggttgtgcgctgggttccatcgttggaaaagatgagagcgtggaagtgccgagcgtaggtggtcgtccgccgcggagtctgcaacgtcagaccctggcagaggtgatcgagccgcgctataccgagctgctcaacctggtcaacgaagagatattgcagttgcaggaaaagcttcgccaacaaggggttaaacatcacctggcggcaggcattgtattaaccggtggcgcagcgcagatcgaaggtcttgcagcctgtgctcagcgcgtgtttcatacgcaagtgcgtatcggcgcgccgctgaacattaccggtttaacggattatgctcaggagccgtattattcgacggcggtgggattgcttcactatgggaaagagtcacatcttaacggtgaagctgaagtagaaaaacgtgttacagcatcagttggctcgtggatcaagcgactcaatagttggctgcgaaaagagttttaatttttatgaggccgacgatgattacggcctcaggcgacaggcacaaatcggagagaaactatgtttgaaccaatggaacttaccaatgacgcggtgattaaagtcatcggcgtcggcggcggcggcggtaatgctgttgaacacatggtgcgcgagcgcattgaaggtgttgaattcttcgcggtaaataccgatgcacaagcgctgcgtaaaacagcggttggacagacgattcaaatcggtagcggtatcaccaaaggactgggcgctggcgctaatccagaagttggccgcaatgcggctgatgaggatcgcgatgcattgcgtgcggcgctggaaggtgcagacatggtctttattgctgcgggtatgggtggtggtaccggtacaggtgcagcaccagtcgtcgctgaagtggcaaaagatttgggtatcctgaccgttgctgtcgtcactaagcctttcaactttgaaggcaagaagcgtatggcattcgcggagcaggggatcactgaactgtccaagcatgtggactctctgatcactatcccgaacgacaaactgctgaaagttctgggccgcggtatctccctgctggatgcgtttggcgcagcgaacgatgtactgaaaggcgctgtgcaaggtatcgctgaactgattactcgtccgggtttgatgaacgtggactttgcagacgtacgcaccgtaatgtctgagatgggctacgcaatgatgggttctggcgtggcgagcggtgaagaccgtgcggaagaagctgctgaaatggctatctcttctccgctgctggaagatatcgacctgtctggcgcgcgcggcgtgctggttaacatcacggcgggcttcgacctgcgtctggatgagttcgaaacggtaggtaacaccatccgtgcatttgcttccgacaacgcgactgtggttatcggtacttctcttgacccggatatgaatgacgagctgcgcgtaaccgttgttgcgacaggtatcggcatggacaaacgtcctgaaatcactctggtgaccaataagcaggttcagcagccagtgatggatcgctaccagcagcatgggatggctccgctgacccaggagcagaagccggttgctaaagtcgtgaatgacaatgcgccgcaaactgcgaaagagccggattatctggatatcccagcattcctgcgtaagcaagctgattaagaattgactggaatttgggtttcgaggctctttgtgctaaactggcccgccgaatgtatagtacacttcggttggataggtaatttggcgagataatacgatgatcaaacaaaggacacttaaacgtatcgttcaggcgacgggtgtcggtttacataccggcaagaaagtcaccctgacgttacgccctgcgccggccaacaccggggtcatctatcgtcgcaccgacttgaatccaccggtagatttcccggccgatgccaaatctgtgcgtgataccatgctctgtacgtgtctggtcaacgagcatgatgtacggatttcaaccgtagagcacctcaatgctgctctcgcgggcctgggcatcgataacattgttatcgaagttaacgcgccggaaatcccgatcatggacggcagcgccgctccgtttgtatacctgctgcttgacgccggtatcgacgagttgaactgcgccaaaaaatttgttcgcatcaaagagactgttcgtgtcgaagatggcgataagtgggctgaatttaagccgtacaatggtttttcgctggatttcaccatcgattttaaccatccggctattgattccagcaaccagcgctatgcgatgaacttctccgctgatgcgtttatgcgccagatcagccgtgcgcgtacgttcggtttcatgcgtgatatcgaatatctgcagtcccgtggtttgtgcctgggcggcagcttcgattgtgccatcgttgttgacgattatcgcgtactgaacgaagacggcctgcgttttgaagacgaatttgtgcgtcacaaaatgctcgatgcgatcggtgacttgttcatgtgtggtcacaatattattggtgcatttaccgcttataaatccggtcatgcactgaataacaaactgctgcaggctgtcctggcgaaacaagaagcctgggaatatgtgaccttccaggacgacgcagaactgccgttggccttcaaagcgccttcagctgtactggcataacgacatttatactgtcgtataaaattcgactggcaaatctggcactctctccggccaggtgaaccagtcgtttttttttgaattttataagagctataaaaaacggtgcgaacgctgttttcttaagcacttttccgcacaacttatcttcattcgtgctgtggactgcaggctttaatgataagatttgtgcgctaaatacgtttgaatatgatcgggatggcaataacgtgagtggaatactgacgcgctggcgacagtttggtaaacgctacttctggccgcatctcttattagggatggttgcggcgagtttaggtttgcctgcgctcagcaacgccgccgaaccaaacgcgcccgcaaaagcgacaacccgcaaccacgagccttcagccaaagttaactttggtcaattggccttgctggaagcgaacacgcgccgcccgaattcgaactattccgttgattactggcatcaacatgccattcgcacggtaatccgtcatctttctttcgcaatggcaccgcaaacactgcccgttgctgaagaatctttgcctcttcaggcgcaacatcttgcattactggatacgctcagcgcgctgctgacccaggaaggcacgccgtctgaaaagggttatcgcattgattatgcgcattttaccccacaagcaaaattcagcacgcccgtctggataagccaggcgcaaggcatccgtgctggccctcaacgcctcacctaacaacaataaacctttacttcattttattaactccgcaacgcggggcgtttgagattttattatgctaatcaaattgttaactaaagttttcggtagtcgtaacgatcgcaccctgcgccggatgcgcaaagtggtcaacatcatcaatgccatggaaccggagatggaaaaactctccgacgaagaactgaaagggaaaaccgcagagtttcgtgcacgtctggaaaaaggcgaagtgctggaaaatctgatcccggaagctttcgccgtggtacgtgaggcaagtaagcgcgtctttggtatgcgtcacttcgacgttcagttactcggcggtatggttcttaacgaacgctgcatcgccgaaatgcgtaccggtgaaggtaaaaccctgaccgcaacgctgcctgcttacctgaacgcactaaccggtaaaggcgtgcacgtagttaccgtcaacgactacctggcgcaacgtgacgccgaaaacaaccgtccgctgtttgaattccttggcctgactgtcggtatcaacctgccgggcatgccagcaccggcaaagcgcgaagcttacgcagctgacatcacttacggtacgaacaacgaatacggctttgactacctgcgcgacaatatggcgttcagcctgaagaacgtgtacagcgtaaactgcactatgcgctggtggacgaagtggactccatcctgatcgatgaagcgcgtacaccgctgatcatttccggcccggcagaagacagctcggaaatgtataaacgcgtgaataaaattattccgcacctgatccgtcaggaaaaagaagactccgaaaccttccagggcgaaggccacttctcggtggacgaaaaatctcgccaggtgaacctgaccgaacgtggtctggtgctgattgaagaactgctggtgaaagagggcatcatggatgaaggggagtctctgtactctccggccaacatcatgctgatgcaccacgtaacggcggcgctgcgcgctcatgcgctgtttacccgcgacgtcgactacatcgttaaagatggtgaagttatcatcgttgacgaacacaccggtcgtaccatgcagggccgtcgctggtccgatggtctgcaccaggctgtggaagcgaaagaaggtgtgcagatccagaacgaaaaccaaacgctggcttcgatcaccttccagaactacttccgtctgtatgaaaaactggcggggatgaccggtactgctgataccgaagctttcgaatttagctccatctacaagctggataccgtcgttgttccgaccaaccgtccaatgattcgtaaagatctgccggacctggtctacatgactgaagcggaaaaaattcaggcgatcattgaagatatcaaagaacgtactgcgaaaggccagccggtgctggtgggtactatctccatcgaaaaatcggagctggtgtcaaacgaactgaccaaagccggtattaagcacaacgtcctgaacgccaaattccacgccaacgaagcggcgattgttgctcaggcaggttatccggctgcggtgactatcgcgaccaatatggcgggtcgtggtacagatattgtgctcggtggtagctggcaggcagaagttgccgcgctggaaaatccgaccgcagagcaaattgaaaaaattaaagccgactggcaggtacgtcacgatgcggtactggaagcaggtggcctgcatatcatcggtaccgagcgtcacgaatcccgtcgtatcgataaccagttgcgcggtcgttctggtcgtcagggggatgctggttcttcccgtttctacctgtcgatggaagatgcgctgatgcgtatttttgcttccgaccgagtatccggcatgatgcgtaaactgggtatgaagccaggcgaagccattgaacacccgtgggtgactaaagcgattgccaacgcccagcgtaaagttgaaagtcgtaacttcgacattcgtaagcaactgctggaatatgatgacgtggctaacgatcagcgtcgcgccatttactcccagcgtaacgaactgctggatgtcagcgatgtgagcgaaaccatcaacagcattcgtgaagatgtgttcaaagcgaccattgatgcctacattccgccacagtcactggaagaaatgtgggatattccggggctgcaggaacgtctgaagaacgatttcgacctcgatttgccaattgccgagtggctggataaagaaccagaactgcatgaagagacgctgcgtgagcgaattctggcgcagtccatcgaagtgtatcagcgtaaagaagaagtggttggtgctgagatgatgcgtcacttcgaaaaaggcgtcatgctgcaaactctcgactctctgtggaaagagcacctggcggcgatggactatctgcgtcagggtatccacctgcgtggctatgcacagaaagatccgaagcaggaatacaaacgtgaatcgttctccatgtttgcagcgatgctggagtcgttaaaatatgaagttatcagcacgctgagcaaagtccaggtacgtatgcctgaagaggttgaggagctggaacaacagcgtcgtatggaagccgagcgtttagcgcaaatgcagcagcttagccatcaggatgacgactctgcagccgcagctgcactggcggcgcaaaccggtgagcgcaaagtaggacgtaacgatccttgcccgtgcggttctggtaaaaaatacaagcagtgccatggtcgcctgcaataaaagctaacagttgaagtaaaaggcgcaggattctgcgccttttttataggtttaagacaatgaaaaagctgcaaattgcggtaggtattattcgcaacgagaacaatgaaatctttataacgcgtcgcgcagcagatgcgcacatggcgaataaactggagtttcccggcggtaaaattgaaatgggcgaaacgccggaacaggcggtggtgcgtgaacttcaggaagaagtcgggattaccccacaacatttttcgctatttgaaaaactggaatatgaattcccggacaggcatataactctgtggttctggctggtcgaaagctgggaaggggagccgtggggtaaagaagggcaacccggtgagtggatgtcgctagtcggtcttaatgccgatgattttccgccagccaatgaaccggtaattgcgaagcttaagcgtctgtaggtcggataaggcgttcacgccgcatccgacatttgcacaagatgcctgatgcgacgctgtccgcgtcttatcaggcctacgtgcggcatcagacaaatgtcactgctttggctcttcgctccaatcatcgctttcggaaagatcgccactgctggggattcgtttttcttcagcagcccattctccgaggtcgatcagctgacaacgtttggagcaaaatggccgaaacgggctgatttcaccccacaccaccgttttcccgcaggttgggcaattcaccgtaatagtttctgacattttcactccttagcaacaggccagttcgaaatccagacgttccggtacctgtccgttttcagtgtccagcggcataaaacgaatggcaaaacggctcttatgtccggaaatttgcggataaagctgtgaatcgagcgacagattcaggcgcagcaagtcggcatcgccaccgttatcctgataaaaaccattcaggctggtttgtttacggaagggggccgactggcgaattaaatccagcaccatggtaagtgcctgggtgagcgggttcaggctggcaatccaggtttctacctggctgtcgcgctgcgcctggggtagatgcagccaaatgtgcaatgtaggtaaatcaaagctgcaacagccgcctgggatgctcagtcgctgacgcaccagagcaatcaaacgatcttcacgcagaaattgcccgatacgcggcgcggaaattaatacgctccccgccgcttttaactgctgaattaatgcttcaatacggctctggtccacgccaggcacgccaatccaggtctggagtttacgttgctgccggtcaagttctttcaacagctcagtgcggacttcgccgcgctcgaaaacatccagtaattcactgacattacggaagaaatgcagcgcgccagcgtggtcaacgatgggtaaattaacggtgagttgctgaatcaaaaactcaatgcgcagccatgtacgcattttttcatttagtggatgttcaaaaaggacctgggtctgcattacggtttttcctgtgagacaaactgcgacgcaagctgcaaatagtgtgcgtgcaggcgggcaacatccgatgcgatagcatccggtgcgccgttattatcaatgacgtcatctgccacggcaaggcgggcttcgcgcgttgcctgagcagcaaggatttgttcgacatgttcgcgagttacatcatcgcgctgcatggtgcgcttaagttgcgtttctgggctgacatccaccaccagcactcgattcgcttttttatacagtgagttttctaccagcaatggcacaacccacagtacatagggggaagttgcttgctggatctggtgttgcgtctcttgctgaatcagcggatgcagcaggtcgttaagccagtttttctcttccgggttggcgaagatccgctcgcgcaaggcccggcgctgcaatgttccatcagcagcaatcatgttagcgccaaagtgatcagcaatggcatgtagcgcaggtgcacctggttcaaccacctgacgcgcaataatatcggcatcaatgacgttaattccgagatcagcaaacgcattggcaacggtactcttgccactgccaatgcctcccgttaaggcaactatatacctcataatttatattcccgggaattcatcatgattatcaaaacgttaaaaatgagcgcacgaaagcgaaattgatgaaacgttcgctcactatttaccaggtaaatttatgggattgtagcgtaaaaaaagacaatttcgcagtcttgcgccgcattgattagtgcgtatgatagcgtcactggagttgcgctcttacccttatagccattaaccccaggaatccgcacatgcgtattgaagaagatctgaagttaggttttaaagacgttctcatccgccctaaacgctccactcttaaaagccgttccgatgttgaactggaacgtcaattcaccttcaaacattcaggtcagagctggtccggcgtgccaattatcgccgcaaatatggacaccgtaggtacattttctatggcctctgcgctggcttcttttgatattttgactgctgtgcataaacactattctgtcgaagagtggcaagcgtttatcaacaattcttccgctgatgtgctgaaacatgtgatggtttctaccggtacgtctgatgcggatttcgaaaaaactaaacagattctcgacctgaacccggcattaaacttcgtttgtattgatgtggcgaatggttattccgaacacttcgtgcagttcgttgcgaaagcgcgtgaagcgtggccgaccaaaaccatttgtgctggcaacgtagtgactggtgaaatgtgtgaggagcttatcctctccggtgctgatatcgttaaagttggcattggcccaggttctgtttgtacaactcgcgtcaaaacaggcgtcggttatccgcagctttctgcggtaatcgaatgtgccgatgcggcgcacggtctgggcggaatgatcgtcagcgacggtggctgcaccacgccgggcgatgtcgcaaaagcctttggcggcggtgccgatttcgtcatgcttggcggcatgctggcgggccacgaagagagcggcggtcgcatcgttgaggagaacggcgagaaatttatgctgttctacggcatgagctccgagtctgcgatgaaacgtcacgttggcggcgttgcggaatatcgcgcagcagaaggtaaaaccgttaagctgccgctgcgaggcccggttgaaaataccgcgcgtgatattttgggcggcctgcgttcagcttgtacatacgttggggcttcacgcctgaaagaactgaccaagcgcaccacatttatccgtgtgcaggaacaagaaaaccgcatcttcaacaacctgtaatctttcaacgctggtgtggagcaacacgccagcgttatcccatcccactcatcgcatcgcctaaatggaaaattggcagatacatcgccaccaccagcgtaccgataattcctcccgttatgatcagcaacgccggttccagtaaggctgcgaggttatccgccagcgccattgtgttatcccgatgatgatgggcgaggttgtctaacatgaggtccagcgagccggatgcctctcctgttctcactaattgcaaacagagcgggctaaactccccggtattttttagcgccagccagatgggatgaccgttactgatatcgtgctggatttgtgtcagaagttgcacccagtacgggcagcgcattgtttctctgacgctctctacgccctgcaaaaaagtaatgcctgcactttgtgtcagcgccagaatcgtaaaaatctgcgtgagtttttgtccccgcatcagtgaacccataatcgggatgcgtaacagcaatttctgccgcactataagccaggtcggtcggcgcatcagcaacttattggctatcgccagcagaaagccgaacaacaccagcagccagctccattcgccactaaagtctgccagcgtcatgatcccctgcgttagtgccggtagtggggtgttgaaggtcttatagatagcggcaaactccggcagaacaaaatgcagcattgccacaaccaccatgattgccatcgctaaaatgatgatgggataacgtaacgctgatttcactttgtcggtcaactgacgctgggctttttgctgacgcgccagttcaaagcagcattcatccagcttaccggtcagttcacccgtgcggatcatcgcctgatagagtggcggaaatacctctgaccagggtaataaggcattggaaaaagcaatgccctgttcgagatcgtgcgccagcgattgcagcaacgcttgccattgcttactgggatgctgttccgccagcagtgccagcccttcagaaagcgttaacccggctttgagtagcgtcgccagttgatgaatgacttccgcgcttttatctcctcgccactgcgcagaattgatggcgattcgcttcaggctaagtggggtaaccatctgttgctgtagtgccatgagcagcaaagcacggctctctgcccatagcatcccatcttgcgcattgccgtcgccggttatgccatgccagcgccagagttgcttactcgccatgcggcatccccagtacgcggattaactcttcaaaggtggttaagccttgctccacggccaggcagccgttttcaaaaagcgtacacatacccgcctgtcgtgcgtgcgtttccagcgattcaacgtcggtattagcggaaataagctgacgaatgaccggcgttatgggcagaacttcaaataaggccgtacgaccataaaaaccgtggtagcaatgtacacaaccgggtgcctgccagtggggcagcggcgacggccatacattgactggaatatggatgggctccccttgctgctggcgacaatgtgggcaaagtttacgtaccagacgctgggctattaccagcgtaagcgctgatgagagcatccagcgggcgactcccatttgctgtaaacgtaccagcgtttcgcaggtggaattagtgtgtagggtagacaacaccaggtgaccagtttgcgccgctttaatagcgatctctgctgtttcgccatcgcggatctctccgatcatgatgacgtcaggatcctggcgcaataacgcacgcaacacgccctgaaaggtgagtccggcacgcggatggatttgcgtctggtttagtccggctatggggatctcaaccggatcttcgacgctacaaatattaatgtcagcggtattcagcgtttgcagggcactataaagcgtgaccgttttgccgctgcctgtagggccagttaccagcaccagtccctgtggttgttgcaaggcatgagcaaagtccgccagttgtaacggctgcattccaagcgtgttgacatccagtgcctgacccacctgctgtaacaaccttaataccaccttttcaccaccccgacatggtaaggtcgcaatacgaaatgagacggcgtttcctgccagttcgacagtgaattgcccgtcctgcggcaggcgatgttccgcaatatccaggtttcccagcacttttaatctggcggttaatgcgactccggcatccggtgaaacatccggtaaaggatgcaatacgccgtcgatacgcaagcggatgcggtaggcattgtccgctggttcgatatgaatatcagacgcgcgttgttccagcgcagattgtaacgttcgagctagcaactctgctttgggctgatgcttctcctgaacagctacgggcaatgtctgttgtgtgcgactggcgtgaccttccatttgttggcgcgtccagcaggtgatctcaatacgtttggtggtagcgaaatgcaatgcgtccagcaactcatgtgagggggcatcgaccaccgcaacatgaaccacttcttcgctggcatccagcaagactccctgataacgcagacacagggccgtgagctgtggaatattcattgccgctccttagttggcgtcatcaaagcggaagacatcttcgcaggcttgctgcaatgcgctgtcactttgaatattgcagttgcgcgtccagccggtgacgccgtttgcgttatcccaacccggtgtcatgacgacgcttagtccattgagactttcttgcccggtcagcgacaccacgccttttgccacactcatggctgaaacatagtgggtggtggtaggcgagggaatgccattgctgccaccgtcgcaggtatctaatccaccatgttccagcgcgcacaactctacggcggtacggtaaggcacaaaggtttgtagcatgtcggtgagtgcggctttgcgcaggtagttttgataagcgggaataccaatggcgcttaaaatggcaatgatgccaataaccaccatcagttcgataagtgtaaaaccgcgttgcttgtccatctgtttcgctccttgatttggttggcgctactttggcaaacgccatcagcacaggcgaggggcaaaaaacgaaacgggaaagcagattccgaggttttttatttcgttgcagcgaaagacaagaaatttgcgaggcgttacgaagaaagttggggaaggggagattatccgcccgcgatggagcggataaatctgtcaactattagcgaaaacgcattgaaaggtcgagtgcttgtacgtgtttagttagcgcaccgacggagataaagtccacgcccgtttcggcaaattcacgcagtgttttgtcagtgacgttgccagacacttccagtagcgccttgccgttggtgcgtttgacggcttcgcgcatctgttctgtttcgaagttatccagcatgatgatatcggctcctgctttcagggcttcatcaagttcttccagattctctacttcgacttctactggcgcatccgggtgcagccaggacgctttttcgaccgcctggcgcactgagccggaggcaataatatggttttctttgatcaggaaggcatcagaaagccccagacggtgattcgctccgccgccgcaaagtaccgcgtatttcagagctgaacgcaggccgggtaaggttttgcgcgtatccaacaactgcgtgttggtgccttccagcaattcgacatagtggcgtaccttactggcaactcctgaaagggtttgcacaaaattaagcgcagtgcgttcgcccgttaacagcacgcgggatgggccttcaagttcgaacaaggattgattggcattgatgacatcgccgtcatccacatgccagattatggtgacatcgtcgcctgccagttgaataaacacctcttcaacccagcgtttgccgcaaaagacgccattctcgcgggtgatcaccgtggcatgagagcgagaattttccggtaaaagttttgccgtaatatcattgttggcatcgactgttccgcctaaatcttcccgcagcgcctgggctaccgcgccggggatatcgagattaatgcgttccagcagctcgtcacgtcgggtgtcagggttatagcggcgaggcggcatgttaaaactccagatagctaacgaatcataaggtagaaacatgctactctgaaccgggtattagcaccacatataaggagatcctgcatgttgttagaacaggggtggctggttggcgcgcgccgcgttccctcaccacattacgattgccgcccggatgacgaaacacccaccctgctggtggtgcacaatattagcctgccgccaggcgagtttggcggtccgtggatcgacgcattattcactggaactattgatccgcaggcacatcctttctttgctgagatcgcccatttgcgcgtctccgctcactgtttgattcgccgtgatggtgaaatagtccagtatgttcctttcgataaacgtgcatggcatgcgggagtctctcagtatcaggggcgcgaacgctgcaatgatttttctattgggattgagcttgaaggcaccgatacgctggcgtataccgatgcgcagtatcaacagcttgcggcggttacgcgggcactgattgattgctatccggatatcgctaaaaacatgacgggccattgtgatattgcgccggatcggaaaaccgatcccggtcctgcatttgattgggcacggtttcgtgtgctggtcagcaaggagacaacatgacgctatttacaaccttactggtgttaattttcgagcgcctgtttaagttgggcgagcactggcagcttgatcatcgtcttgaagcgttctttcggcgggtgaaacatttttctctcgggcgcacgttaggcatgaccattattgcgatgggcgtgacttttttactgttacgcgcattgcagggagtattgttcaacgttcccacgctactggtgtggctgctgattggtttgctgtgtattggcgcaggtaaagttcgtcttcattatcatgcttatctgacagctgcttcacgtaatgatagccatgcccgtgccacgatggctggcgaactcaccatgattcacggcgtcccggcaggctgcgacgaacgtgagtatttgcgtgagctgcaaaatgcattgctgtggattaactttcgtttttatcttgcaccgctgttctggctgattgtggggggaacctggggacccgttacgctgatggggtatgcgtttttgcgtgcatggcaatactggctggcgcgatatcagacgccgcatcatcgtttacagtccggcattgatgccgtgcttcatgtactggattgggtgccggttcgtcttgcgggtgtggtatatgccttgatcggtcatggtgagaaagcgttaccggcctggtttgcttcgctgggtgatttccatacttcgcagtatcaggtgttaacgcgtctggcgcagttctctctggcgcgtgaaccgcatgtcgataaggtggagacgccgagggcagcggtttcaatggcgaagaaaacctcgttcgtggtcgtggtggtgattgcactactgacgatttacggggcgttggtgtaaagattattgccctcaccctgtacgggtgagggcgtagagagattaatgcgcttttacggctttggcggttttctctttaaacagatagccgatacctaacacgatcagccataccgggatcaggtataccgaaatcgccattcctggggtcatcagcataatcaccagtaccgccgccataaacagcaggcagatccagttacccagcggataaagcagagcagggaagtgagttaccacgccttgttcctgcttggcgcgacggaatttcatatgcgccaggctaatcatcgcccagttgattaccagtgcagataccaccagcgccattaacagtccgaaagcggactctggggcaaggtagttaatcagtacgcacaacgccgttaccagtgcagacaccagaatggtatttactggtacaccacgtttatcgacagacgccagcgcttttggcgcattaccctgttgtgccagaccaaacagcatacggctgttgcaatatacgcagctgttgtacacggagagcgccgcagtcagtaccacgatgttcagcgcattcgccacaaaggtatcgcctaactcgtggaagatcagcacaaacggactggtatcggcggtaacgcgggtccacggcatcagtgagagcagaacggctaacgaaccaatatagaaaatcaggatgcggtagataacctggttagttgctttcggtatactttgctccgggttatcagcttctgctgcggtgatccccaccagttccagaccaccgaacgagaacatgataatcgccatcatcatcaccagcccggtgaagccgtgcggcaggaaaccaccctgatcccacaggttgctaacggtcgcctgcgggccgccgttgccactgaatagcagccagccgccgaagatgatcatcgctaccaccgcgataactttgataatggcaaaccagaactccatctcgccaaacactttaacgttggtcaggttgatggcgttaatcaccacaaagaatacggcggcagaaacccaggtggggatttccggataccagaactgaatgtatttacccacggcagtcagctcagccatggcaactaaaacgtacagtacccagtagttccagccagaggcgaaaccggcaaaactgccccagtatttataagcaaagtggctaaaggagcctgcgacaggttcttcgaccaccatttcacccagctgacgcatgatcagaaaggcgataaaaccagcaatggcgtaacccaggataatccctggccctgcggactgtattacggaggcgctacccaggaataacccggtccctatcgcgccacccagcgcgataagctgaatatggcggtttttaaggccgcgctttagctgctcgccgtgctgttgaccttccatcatgaaacctcgtgcggtggttgtttttttgatctacgcagtgatgcgtgtgtaagtttgcaattccgtttgttgtattaatttgtttacatcaaagaagtttgaattgttacaaaaagacttccgtcagatcaagaataatggtatgcagcagcgaatgcacccgctttatgcatggttgaagatgagttgcttaaaaagaaaccgtttgtaaagctcagcctcaacccctctcaatatgtagaatgaatttaaattcgttttaattgaattaaaaatcacaaaattggtaagtgaatcggttcaattcggatttttatagtttaataatcgttaaaaaactcctttcctacgtaaagtctacatttgtgcatagttacaactttgaaacgttatatatgtcaagttgttaaaatgtgcacagtttcatgatttcaatcaaaacctgtatggacataaggtgaatactttgttactttagcgtcacagacatgaaattggtaagaccaattgacttcggcaagtggcttaagacaggaactcatggcctacagcaaaatccgccaaccaaaactctccgatgtgattgagcagcaactggagtttttgatcctcgaaggcactctccgcccgggcgaaaaactcccaccggaacgcgaactggcaaaacagtttgacgtctcccgtccctccttgcgtgaggcgattcaacgtctcgaagcgaagggcttgttgcttcgtcgccagggtggcggcacttttgtccagagcagcctatggcaaagcttcagcgatccgctggtggagctgctctccgaccatcctgagtcacagtatgacttgctcgaaacacgacacgccctggaaggtatcgccgcttattacgccgcgctgcgtagtaccgatgaagacaaggaacgcatccgtgaactccaccacgccatagagctggcgcagcagtctggcgatctggacgcggaatcaaacgccgtactccagtatcagattgccgtcaccgaagcggcccacaatgtggttctgcttcatctgctaaggtgtatggagccgatgttggcccagaatgtccgccagaacttcgaattgctctattcgcgtcgcgagatgctgccgctggtgagtagtcaccgcacccgcatatttgaagcgattatggccggtaagccggaagaagcgcgcgaagcatcgcatcgccatctggcctttatcgaagaaattttgctcgacagaagtcgtgaagagagccgccgtgagcgttctctgcgtcgtctggagcaacgaaagaattagtgatttttctggtaaaaattatccagaagatgttgtaaatcaagcgcatataaaagcgcggcaactaaacgtagaacctgtcttattgagctttccggcgagagttcaatgggacaggttccagaaaactcaacgttattagatagataaggaataacccatgtcagaacgtttcccaaatgacgtggatccgatcgaaactcgcgactggctccaggcgatcgaatcggtcatccgtgaagaaggtgttgagcgtgctcagtatctgatcgaccaactgcttgctgaagcccgcaaaggcggtgtaaacgtagccgcaggcacaggtatcagcaactacatcaacaccatccccgttgaagaacaaccggagtatccgggtaatctggaactggaacgccgtattcgttcagctatccgctggaacgccatcatgacggtgctgcgtgcgtcgaaaaaagacctcgaactgggcggccatatggcgtccttccagtcttccgcaaccatttatgatgtgtgctttaaccacttcttccgtgcacgcaacgagcaggatggcggcgacctggtttacttccagggccacatctccccgggcgtgtacgctcgtgctttcctggaaggtcgtctgactcaggagcagctggataacttccgtcaggaagttcacggcaatggcctctcttcctatccgcacccgaaactgatgccggaattctggcagttcccgaccgtatctatgggtctggggccgattggtgctatttaccaggctaaattcctgaaatatctggaacaccgtggcctgaaagatacctctaaacagaccgtttacgcgttcctcggcgacggtgaaatggacgaacctgaatccaaaggtgcgatcaccatcgctacccgtgaaaaactggataacctggtcttcgttatcaactgtaacctgcagcgtcttgacggcccggtcaccggtaacggcaagatcatcaacgaactggaaggcatcttcgaaggtgctggctggaacgtgatcaaagtgatgtggggtagccgttgggatgaactgctgcgtaaagataccagcggtaaactgatccagctgatgaacgaaaccgttgacggcgactaccagaccttcaaatcgaaagatggtgcgtacgttcgtgaacacttcttcggtaaatatcctgaaaccgcagcactggttgcagattggactgacgagcagatctgggcactgaaccgtggtggtcacgatccgaagaaaatctacgctgcattcaagaaagcgcaggaaaccaaaggcaaagcgacagtaatccttgctcataccattaaaggttacggcatgggcgacgcggctgaaggtaaaaacatcgcgcaccaggttaagaaaatgaacatggacggcgtgcgtcacatccgcgaccgtttcaatgtgccggtgtctgatgcagatatcgaaaaactgccgtacatcaccttcccggaaggttctgaagagcatacctatctgcacgcacagcgtcagaaactgcacggttatctgccaagccgtcagccgaacttcaccgagaagcttgagctgccgagcctgcaagacttcggcgcgctgctggaagagcagagcaaagagatctctaccactatcgctttcgttcgtgccctgaacgtaatgctgaagaataagtcgatcaaagatcgtctggtaccgatcatcgccgacgaagcgcgtactttcggtatggaaggtctgttccgtcagattggtatttacagcccgaacggtcagcagtacaccccgcaggaccgcgagcaggttgcttactataaagaagacgagaaaggtcagattctgcaggaagggatcaacgagttgggcgcaggttgttcctggctggcagcggcgacctcttacagcaccaacaatctgccgatgattccgttctacatctattactcgatgttcggcttccagcgtatcggcgatctgtgctgggcggctggcgaccagcaagcgcgtggcttcctgatcggcggtacttccggtcgtaccaccctgaacggtgaaggtctgcagcacgaagatggtcacagccacattcagtcgctgactatcccgaactgtatctcttacgacccggcttacgcttacgaagttgctgtcattatgcatgacggtctggagcgtatgtacggtgaaaaacaagagaacgtttactactacatcactacgctgaacgaaaactaccacatgccggcaatgccggaaggtgctgaggaaggtatccgtaaaggtatctacaaactcgaaaccattgaaggtagcaaaggtaaagttcagctgctgggctccggttccatcctgcgtcacgtccgtgaagcggcagagatcctggcgaaagattacggcgtaggttctgacgtttatagcgtgacctccttcaccgaactggcgcgagatggtcaggattgtgaacgctggaacatgctgcacccgctggaaactccgcgcgttccgtatatcgctcaggtgatgaacgacgctccggcagtggcatctaccgactatatgaaactgttcgctgagcaggtccgtacttacgtaccggctgacgactaccgcgtactgggtactgatggcttcggtcgttccgacagccgtgagaacctgcgtcaccacttcgaagttgatgcttcctacgtggttgtagcggcgctgggcgaactggctaaacgtggcgaaatcgataagaaagtggttgctgacgcaatcgccaaattcaacatcgatgcagataaagttaacccgcgtctggcgtaagaggtaaaagaataatggctatcgaaatcaaagtaccggacatcggggctgatgaagttgaaatcaccgagatcctggtcaaagtgggcgacaaagttgaagccgaacagtcgctgatcaccgtagaaggcgacaaagcctctatggaagttccgtctccgcaggcgggtatcgttaaagagatcaaagtctctgttggcgataaaacccagaccggcgcactgattatgattttcgattccgccgacggtgcagcagacgctgcacctgctcaggcagaagagaagaaagaaacagctccggcagcagcaccagcggctgcagcggcaaaagacgttaacgttccggatatcggcagcgacgaagttgaagtgaccgaaatcctggtgaaagttggcgataaagttgaagctgaacagtcgctgatcaccgtagaaggcgataaagcttctatggaagttccggctccgtttgctggcaccgtgaaagagatcaaagtgaacgtgggtgacaaagtgtctaccggctcgctgattatggtcttcgaagtcgcgggtgaagcaggcgcggcagctccggcggctaaacaggaagcggctccggcagcggcccctgcaccagcggctggcgtgaaagaagttaacgttccggatatcggcggtgacgaagttgaagtgaccgaagtgatggtgaaagtgggcgacaaagttgccgctgaacagtcactgattaccgtagaaggcgacaaagcttctatggaagttccggctccgtttgcaggcgtcgtgaaggaactgaaagtcaacgttggcgataaagtgaaaactggctcgctgattatgatcttcgaagttgaaggcgcagcgcctgcggcagctcctgcgaaacaggaagcggcagcgccggctccggcagcaaaagctgaagctccggcagcagcaccggctgcgaaagcggaaggcaaatctgaatttgcagaaaacgacgcttacgttcacgcgactccgctgatccgccgtctggcacgcgagtttggcgttaacctggcgaaagtgaagggcactggccgtaaaggtcgtatcctgcgcgaagacgttcaggcttacgtgaaagaagctatcaaacgtgcagaagcagctccggcggcgactggcggcggtatcccaggcatgctgccgtggccgaaggtggacttcagcaagtttggtgaaatcgaagaagtggaactgggccgtatccagaaaatttctggtgcgaacctgagccgtaactgggtgatgatcccgcatgttactcacttcgacaaaaccgatatcaccgagctggaagcgttccgtaaacagcagaacgaagaagcggcgaaacgtaagctggatgtgaagatcaccccggttgtcttcatcatgaaagccgttgctgcagctcttgagcagatgcctcgcttcaacagttcgttgtcggaagacggtcagcgtctgaccctgaagaaatacatcaacatcggtgtggcggtggataccccgaacggtctggttgttccggtattcaaagacgtcaacaagaaaggcatcatcgagctgtctcgcgagctgatgactatttctaagaaagcgcgtgacggtaagctgactgcgggcgaaatgcagggcggttgcttcaccatctccagcatcggcggcctgggtactacccacttcgcgccgattgtgaacgcgccggaagtggctatcctcggcgtttccaagtccgcgatggagccggtgtggaatggtaaagagttcgtgccgcgtctgatgctgccgatttctctctccttcgaccaccgcgtgatcgacggtgctgatggtgcccgtttcattaccatcattaacaacacgctgtctgacattcgccgtctggtgatgtaagtaaaagagccggcccaacggccggcttttttctggtaatctcatgaatgtattgaggttattagcgaatagacaaatcggttgccgtttgttgtttaaaaattgttaacaattttgtaaaataccgacggatagaacgacccggtggtggttagggtattacttcacataccctatggatttctgggtgcagcaaggtagcaagcgccagaatccccaggagcttacataagtaagtgactggggtgagggcgtgaagctaacgccgctgcggcctgaaagacgacgggtatgaccgccggagataaatatatagaggtcatgatgagtactgaaatcaaaactcaggtcgtggtacttggggcaggccccgcaggttactccgctgccttccgttgcgctgatttaggtctggaaaccgtaatcgtagaacgttacaacacccttggcggtgtttgcctgaacgtcggctgtatcccttctaaagcactgctgcacgtagcaaaagttatcgaagaagccaaagcgctggctgaacacggtatcgtcttcggcgaaccgaaaaccgatattgacaagattcgtacctggaaagagaaagtgatcaatcagctgaccggtggtctggctggtatggcgaaaggccgcaaagtcaaagtggtcaacggtctgggtaaatttaccggggctaacaccctggaagttgaaggtgagaacggtaaaaccgtgatcaacttcgacaacgcgatcattgcagcgggttctcgcccgatccaactgccgtttattccgcatgaagatccgcgtatctgggactccactgacgcgctggaactgaaagaagtaccagaacgcctgctggtaatgggtggcggtatcatcggtctggaaatgggcaccgtataccacgcgctgggttcacagattgacgtggttgaaatgttcgaccaggttatcccggcagctgacaaagacatcgttaaagtcttcaccaagcgtatcagcaagaaattcaacctgatgctggaaaccaaagttaccgccgttgaagcgaaagaagacggtatttatgtgacgatggaaggcaaaaaagcacccgctgaaccgcagcgttacgacgccgtgctggtagcgattggtcgtgtgccgaacggtaaaaacctcgacgcaggcaaagctggcgtggaagtggacgaccgtggtttcatccgcgttgacaaacagctgcgtaccaacgtaccgcacatctttgctatcggcgatatcgtcggtcagccgatgctggcacacaaaggtgttcacgaaggtcacgttgccgctgaagttatcgccggtaagaaacactacttcgatccgaaagttatcccgtccatcgcctataccgaaccagaagttgcatgggtaggtctgactgagaaagaagcgaaagagaaaggcatcagctatgaaaccgccaccttcccgtgggctgcttctggtcgtgctatcgcttccgactgcgcagacggtatgaccaagctgattttcgacaaagaatctcaccgtgtgatcggtggtgcgattgtcggtaccaacggcggcgagctgctgggtgaaatcggcctggcaatcgaaatgggttgtgatgctgaagacatcgcactgaccatccacgcgcacccgactctgcacgagtctgtgggcctggcggcagaagtgttcgaaggtagcattaccgacctgccgaacccgaaagcgaagaagaagtaattgttcgtttgccggaacatccggcaattaaaaaagcggctaaccacgccgcttttttttacgtctgcaatttacctttcctgtcgccttgctccgcgctcagagagacgttcgcgtactgctgaccgttgctcgttattcagcctgacagtatggttactgtcgtttagacgttgtgggcggctctcctgaactttttcccgaaaaacctgacgttgttcaggtgatgccgattgtatacgctggcgggcgttatcacgttgctgttggttcagtgggcgctgctgtactttttccttaaatacctggcgctgttcgggagttgcagactgaatacgctcacgcgctgcctctcttcgctgctggttctgtgggttagtctgcattttctcgcgaaccgcctggcgctgctcaggcgaggcggactgataacgctgacgagcggcgtccttttgttgctgggtcaggggttggcgacggctgaagtcgcggaagtcgtcatagctcccatagtgttcagcttcattaaaccgctgtgccgctgcctgacgttgggtatctcgtgtaatgacgggggcggcgtgtgttcgttgctgaaactgacttgctgccgcctgacgctggctgtcgcgtgttggagcaggtagctgcgtggcactcattccgccgttgacatcggtttgatgaaaccgctttgccatatcctgatcatgatagggcacaccattacggtagtttggattgtgccgccatgccatattcttatcagtaagatgctcaccggtgatacggttgaaattgttgacgtcgatattgatgttgtcgccgttgtgttgccagccattaccgtcacgatgaccgccatcgtggtgatgataatcatcatcgtcatgatgatgatggtcatgatcgtcgtcgtcccagtcgatgctgctgaatagtgcgtacgtggtagcaacacccatgctatagccgaatccgcgcacaaagctgtcaataaacggttctccggctggtggtggcagataaaccggcggatacgcagtattggcccagttcccgtaaaccacggttgggttgtagttgggaatatagaccacatcaggattggcgggctcaatggaaatgacggttgttgcaggctctgtaatgatggggctggcagttgaaacggtattggatggtatgacgggagccgtgactgtctgtgttaccggtacagctttcttcgttgtggtaataactttctgttcggttgatgacttcagcgagccggtttgttgcgccagttgccgcaatcgctgtaccgagtccatcacgtcctgcggctgcgccagaaaagcatcgcccaggttttgcacccattgcgggttttcgcccatcaatgccatcaattgtggaaaggccaccagtgatttaacgctggcgtcccacggctggtcagatactgcctgaatagcagcatcgccttgtttaagtggattatcgtgcgaccattgcactgcttgagcaacgtttgccggataggttgatgccattaacacttgtgaaagcagagaatcggggtacagcgcgacaggcgcaacccattgatcgatttgtgcagtgctgaatgcggatttgacgacggcgggcgttacgggcggtgcggaaaccgttgcaggaagcgtaactgcggtgatgtcaggcgcagtctgttgtgtcgattgcggttccacaggcgcttccactgtgcggctttttatatatagcccggtagaggcggcacaaagcccggcactgcaaattagcgccagcacatggggtttaaacggcaaagtcattttcataattcggatctcaaggaaatcgcaatggtcggcgaactgccacccgcaggtgctgtgaatccgagtataaagaggcggtagtttaaattttgactaatcttgggattcgttgagaaaggtgattatcaccatgcgaattaacgaagtttttacggagggaaacaatctctagaccatccttaacgattcagccacttttttatgttgcttttttgtaaacagattaacacatcgtcaaaatcctgctattctgcccgttgcggtactgggcatttaccctacaaactgctgtctcacaggagcgtgaagagaatcgcctgccgcactatgacaatgagagcgaggagaaccgtcgtgctagaagaataccgtaagcacgtagctgagcgtgccgctgaggggattgcgcccaaacccctggatgcaaaccaaatggccgcacttgtagagctgctgaaaaacccgcccgcgggcgaagaagaattcctgttagatctgttaaccaaccgtgttccccctggcgtcgatgaagccgcctatgtcaaagcaggcttcctggctgctatcgcgaaaggcgaagccaaatcccctctgctgactccggaaaaagccatcgaactgctgggcaccatgcagggtggttacaacattcatccgctgatcgacgcgctggatgatgccaaactggcaccgatcgctgccaaagcactttctcacacactgctgatgttcgataacttctatgacgtagaagagaaagcgaaagcaggcaacgaatatgcgaagcaggtaatgcagtcctgggcggatgccgaatggttcctgaatcgcccggcgctggctgaaaaactgaccgttaccgtcttcaaagtcactggcgaaactaacaccgatgacctttctccggcaccggatgcgtggtcacgcccggatatcccactgcacgcgctggcgatgctgaaaaacgcccgtgaaggtattgagccagaccagcctggtgttgttggtccgatcaagcaaatcgaagctctgcaacagaaaggtttcccgctggcgtacgtcggtgacgttgtgggtacgggttcttcgcgtaaatccgccactaactccgttctgtggtttatgggcgatgatattccacatgtgccgaacaaacgcggcggtggtttgtgcctcggcggtaaaattgcacccatcttctttaacacgatggaagacgcgggtgcactgccaatcgaagtcgacgtctctaacctgaacatgggcgacgtgattgacgtttacccgtacaaaggtgaagtgcgtaaccacgaaacaggcgaactgctggcgaccttcgaactgaaaaccgacgtgctgattgatgaagtgcgtgctggcggccgtatcccgctgattatcgggcgtggcctgaccaccaaagcgcgtgaagcacttggtctgccgcacagtgatgtgttccgtcaggcgaaagatgtcgctgagagcgatcgcggcttctcgctggcgcagaaaatggtaggccgtgcctgtggcgtgaaaggcattcgtccgggcgcgtactgcgaaccgaaaatgacttctgtaggctctcaggacaccaccggcccgatgacccgtgatgaactgaaagacctggcgtgcctgggcttctcggctgacctggtgatgcagtctttctgccacaccgcggcgtatccgaagccagttgacgtgaacacgcaccacacgctgccggacttcattatgaaccgtggcggtgtgtcgctgcgtccgggtgacggcgtaatccactcctggctgaaccgtatgctgctgccggataccgtcggtaccggaggtgactcccatacccgtttcccgatcggtatctctttcccggcgggttctggtctggtggcatttgcagccgcaacaggcgtaatgccgctggatatgccggaatccgttctggtgcgcttcaaaggcaaaatgcagccgggcatcaccctgcgcgatctggtacacgcgatcccgctgtatgcgatcaaacaaggtctgctgaccgttgagaagaaaggcaagaaaaacatcttctctggtcgcattctggaaattgaaggtctgccggatctgaaagttgagcaggcatttgaactgaccgatgcgtccgctgagcgttctgccgctggttgtactatcaagctgaacaaagaaccgatcatcgaatacctgaactctaacatcgtcctgctgaagtggatgatcgcggaaggttatggcgatcgtcgtaccctcgaacgtcgtattcagggcatggaaaaatggctggcgaatcctgagctgctggaagccgatgcagatgcggaatacgcggcagtgattgacatcgatctggcggatattaaagagccaatcctgtgtgctccgaacgacccggatgacgcgcgtccgctgtctgcggtacagggcgagaagatcgacgaagtatttatcggttcttgcatgactaacatcggtcacttccgtgctgcgggtaaactgctggatgcgcataaaggccagttgccgacccgcctgtgggtggcaccgccaacccgtatggatgccgcgcagttgaccgaagaaggctactatagcgtcttcggtaagagcggtgcgcgtatcgagatccctggctgttccctgtgtatgggtaaccaggcgcgtgtagcagacggtgcgacggtggtttccacctctacccgtaacttcccgaaccgtctggggactggcgcgaatgtcttcctggcttctgcagaactggcggctgttgcggcgctgattggcaaactgccgacgccggaagagtaccagacctacgttgcgcaagtagataaaactgccgttgatacttatcgttatctgaacttcaaccagctttctcagtacaccgaaaaagccgatggggtgattttccagactgcggtgtaataagtaagcgcacgcgctgcgcataaacgacacaatgcccggtgaatgagattcccgggcatttttttatttctaaaccatcgccgttccgctgtttttctccggtaaggctgcgataattacatcaatggcgcaatgcgatttcggcgcattgccaggagcagaggaacacactatggattacgaatttctgcgcgatattaccggagttgtaaaggtgcgtatgtccatggggcatgaagtggtcgggcactggtttaatgaagaggtgaaagaaaacctggccttgcttgatgaagtggaacaagcggcgcacgcactgaaaggtagcgaacgttcctggcagcgggcagggcatgagtacactctgtggatggacggtgaagaggtgatggttcgcgccaatcaactggaattcgctggcgatgaaatggaagaggggatgaactactacgacgaagaaagcctgtcgctatgcggcgttgaggattttctgcaggtcgtggcggcttaccgtaatttcgtgcagcagaagtaaataaatctggcggagcctgggagctccgcccgagacgttaaacagctggcatattgcgcccgtaataaatctcgcgcatttctttccacagcgcagcggtaatttcctggcgctcgctgtcggttaaatcttccggtttggtgtggaacatgtagtgcttaaggtcgaactctttaagcaacatcttggtatggaagatattttcctgatagacgtttacatccaccatgtcatacagcgccttcatatcgtcagacataaagttctgaatcgaattaatctcatggtcgataaagtgcttcataccgttaatgtcgcgggtaaaaccgcgcacgcgataatcaatggttacgatatcggactcaagctggtggatcaggtaattcagcgccttcagcggagaaatcacgccgcaggtagagacttcaatatcggcgcggaaggtacataaaccgccttcaggatgactttccgggtaggtatgtacgcaaatatgacttttatcgagatgggcaacgaccgtttctggcagtgggccggggtgttctgttttgtcgatgagtttcgggtcaaccggttcttcactcaccagaatagtgacgctggcaccctgtggttcgtaatcctggcgggcgatgttaagaatattggccccgataatggaacaggtttctgacaggatttcggtcagacggttggcattatagagttcatcgatataagcaatataaccgtcgcgctcttcggcagttttggcgtagcagatatcgtaaatacaaaaactcagacttttggtcagattattaaagccatgcagtttcagttttttcaatttcttatcttctccttaggacggctgtgaagccagtgcgtcttgcagatactgaggtaaggcaaaagctgccgtatggattgccggattgtaataacggcatttcaggccagaggcgagaaaacgcgcctgaataatttcggttgagagatggcgtaaggcgtcgttatctgtcgcccatgcaaaagtcatgataccgccgtaataggtcgggatcgccgcctgataaaagccaacgtcgctgaagtaatggctgagtttgcgatggctgtcgatggcttcttcctgctgtaaaaagcagacgccgttttgtgcgacgaagataccgccaggattcaggcaacgtttgcagccttcataaaatgccgaagtgaaaaagctttcgccgggaccgataggatcggtgcagtcggagataatgacatcaaaggtctggctggtttgattaacgaaattgacgccatcgtcgatcaccagcttaaagcgcggatcgtcgtagctaccggcgttatggttgggtagatactgacggcagaacgatacgacacccgcatcgatttccaccatcgtgattgactcaacgtttttatgtcgggttacttcacgcagcatggcaccgtcgccgccgccgataatcagcacatgtttcgcgtgaccatgggccagtagcggaacatgggtcatcatctcatgatagataaactcgtcgcgctcggtggtttgtactacgccatccagcgccattacgcgaccaaatgcagcgttctcaaaaatgatcagatcctggtgatcggtcttttcatgatacagaacgttatctaccgcaaagtactgcccaaactggtcgtgtagcgtttcatgccactgttttttttcggccatgggttgatacctcctttgttaacacccgtaaaaaaagggcgcaacataatagctaacattgaccgcggatgcacggtcaatatttctacaaaaaggtatcagggattatttgacgtaggcaagcaggcttaaggaatcgcgggccagggctttgcactttttagcgacgggaatgccaatgccgctgagatcgcggtagctgtcttcaccgagggctttcatgtcgaaggtgtcgtaattactgagatcccactggttttgctgggcgaaaaagaccagtgcgcgacgaatttgcccgttaggtaagttctggtaaccacaatcgttcttcagaaagacaaaaactgccgttaaatcggccatatcttcggcttcagactcgctgagcgcgtaactgtttgcgcaaacggccatcaggctgccgaataacactgttctgaaaaacgtcttcattgcttctaccaggggcttaaagaagataaacgttagcacactgcgagcgaggcgacgaccattattgtcgattaaattgtgtctgcggcttgaccttcccgtaaggggaaggactatgctcaacgtttgattttgtttcgcctgcttaagaataaggaaataactatgcaacgtcgtgatttcttaaaatattccgtcgcgctgggtgtggcttcagccttgccgctgtggagccgcgcagtctttgcggcggaacgcccaacgttaccgatccctgatttgctcacgaccgatgcccgtaatcgcattcagttaactattggcgcaggtcagtctacctttggcgagaaaactgcaactacctggggctataacggcaatctgctggggccggcggtgaaattacagcgcggcaaagcggtaacggttgatatctataaccaactgacggaagagacgacgttgcactggcacgggctggaagtaccgggtgaagtcgacggcggcccgcagggaattattctgccaggtggcaagcgctcggtgacgttgaacgttgatcaacctgccgctacttgctggttccatccacatcaacatggcaagaccgggcgacaggtggcgatggggttggctgggctggtggtaattgaagatgacgagatcctgaaattaatgctgccaaaacagtggggtatcgatgatgttccggtgattgttcaggataaaaaatttaacgctgatgggcagattgattatcaactggatgtgatgaccgccgccgtgggctggtttggcgatacgctgctgaccaacggtgcaatctacccacaacacgctgccccgcgtggttggctgcgcctgcgtttgctcaatggctgtaatgcccgctcgctcaatttcgccaccagcgacaatcgcccgctgtatgtgattgccagcgacggtggtctgctacctgaaccggtgaaggtgagcgagctgccggtgctgatgggcgagcgttttgaagtgctggtggaggttaacgacaacaaaccctttgacctggtgacgctaccggtcagccagatggggatggcgattgcgccgtttgacaagccgcatccggtaatgcggattcagccgattgctattagtgcctccggtgctttgccagacacattaagtagcctgcctgcgttaccttcgctggaagggctgacggtacgcaagctgcaactttctatggacccgatgctcgatatgatgggtatgcagatgctaatggagaaatatggcgatcaggcgatggccggaatggatcacagccagatgatgggccatatggggcacggtaatatgaatcatatgaaccacggtgggaagttcgatttccaccatgccaataaaatcaacggtcaggcgtttgatatgaataagccgatgtttgcggcggcgaaagggcagtacgaacgttgggttatctctggcgtgggcgacatgatgctgcatccgttccatattcacggcacccagttccgtatcttgtcagaaaatggcaaaccgccagcggctcatcgcgcgggctggaaagataccgttaaggtagaaggcaatgtcagtgaagtgctggtgaagtttaatcacaacgcaccgaaagaacatgcttatatggcgcactgccatctgctggagcatgaagatacggggatgatgttagggtttacggtataaaaagaccgtattcggaaatatgcccggatctctccgggcattatggttatttcacatcatccggcagcgcataagccacaatatagtcgcccatcttcgtaccaaatgaaccgtgaccgcctgcggagatcaccacatactgcttgccattcacttcataggtcattggcgtcgcctgaccacccgctggtaaacggccctgccacagtttttcaccgttgctcatgttgtaagcgcgcaggtagttatctgccgtagcagcgataaacagcacgttacccgccgtggagattggcccgcccagcatcggcatacccatattgaacggcaccggtacaggcatcgggaacggcatactgtcttgcggcgtaccaatacgtttcttccacaccacttcattggttttcagatccagcgccgagatataaccccatgctggctgtttacacggcagaccaaacggtgagaggaacgggttgagcgtgacaccatacggtacaccgtactgtggctgaatgccggattccgtacccgtgcctttggcatctttcggctgctccatcgggttacccggaccgcgtgggatcagtttcgaaacaaacggcagtgccattgggttggcaattgccacttcacgatttggatcaacggaaatcccgccccattcgaacatccccaggttacccgggaagaccagcgtaccctgttcagatggcggggtgaaaatgccttcatagcgcatctggtggaacatcacgcggcacaccagttggtcaaacatggtggctccccacatatccgcaccgctcaaatctttcgtcggacggaagctcagttccgagaatggttgagtaggggtaacgtaatcgcctttggcagcaccttggggaaccggtttttccggtgccggaaccaccagttcgccattacgacgatcgagcacaaaaatgttgccggttttcgccggagcgtaaataactggcactttctgaccattaacggtgatgtccgccagcgtcggctgtgccggaagatccatatcccacaggtcgtggtgaacggtctggtagctccacgccagtttcccggtagtggcattcagcgccagaatcgagctggcataacgttcctgttccggtgtgcggttaccgccccagatatccggcgtggtcacgcccatcggcagatagaccagatccagcttcgcgtcataggccgctggtgcccaggagtttggcgagttaaaggtaaaggtgtgttcgtcagacgggattgcgttcggatctttcgcgccgggatcaaaagcccacagcagctccccggtgttgacatcaaaaccacggatcacgccagacgtttcgcgggttgagaagttatcggtaactgacccggccatcacgatggttttatcggtgataatcggtggcgaagtcggttcatacagacccggtttggtgtctggcatattgctttgcagattgagtacgcctttattggcgaaggtttcgcacagtttgccgttttcagcgttaatcgcaatcagtcgaccatcattgaccggaagaatgatacgacgcgggcaatccgccatcacttccggcgaagccgtttctgctttggcttcatgataagagacgccacggcaggttacgtgctggaaagactcgttagttttcagctcaggatcgtaatgccatttctctttgccgctggcggcatcgagcgcaaacaggcgctggtgagcggtacacaggtaaagggtgtcgcccactttaatcggcgtcacttcattggtgatttcgcccggatcgttcggctgcttcacatcgccagtacggaacacccaggcttctttcagattatggacgttatcggcgttaatttgtttcagaggtgaaaagcgttgaccttcctgattgcgaccataggcaggccagtcctgatcggcaacgggtgagatagcttccgcaggtgtggcattggcgcttaaggtgccgttgatttcctgcggatcgttaaatccggcccaggtcaggataccaccgctaatcagcagtgccaccaccagtgcggcaactgcgccgctggcaggaatgaccaggcgacgccagacaaacggcaggatcagccagatgccgaagaagaccagaatgtcgctgcgcggagtcagcgcccagaagtcgaaaccaacttcccagacgccccaaatcatggtgccgagcagcagggctgcgtacagccaaagcgcggcacgtttactgcgccacagcatccaggcgacgccgagcatcacaagaccagcgatagggtagtaccaggagccgccaatcgcgaccagccagcctccgccaatgagtagatacagcccgcaaagcgctgcaaaaagggctgttagcgtgacgagtaatcgtcgcgagcctgtattgttaattgccataaagagacaccatttcaattcattaatattttagtagcaattaattataggttttaacatgtgtgatcgtcatcacaattcgagctttattaacagattccgcgaatgaatagttttactggtatactgcgtgtcttgcgctttgttgcggtgccaaaacctgcccgtgcgaagtgatttgtttttaaatcatatggttagagatatgaaacatactgtagaagtaatgatccccgaagcggagattaaagcgcgtatcgccgaactgggtcgtcagattactgagcgttacaaagacagcggcagcgatatggtgctggttggtctgctgcgtggctcatttatgtttatggcggacctgtgccgtgaagttcaggtatctcatgaagtcgactttatgaccgcctccagctacggtagcggcatgtccaccacccgtgatgtgaaaatcctcaaagatctggatgaagatatccgtggcaaggacgtgctgattgttgaagatatcatcgactcggggaatacactgtcgaaagtgcgtgagatcttaagcctgcgcgaaccgaagtcgctggcgatttgtacgctgctggataaaccgtcccgtcgtgaagtgaacgtcccggtagaatttatcggtttctcgatcccggatgagtttgtggtgggttacggcattgattacgcacagcgttaccgtcatctgccgtatatcggcaaagtgattctgctggacgagtaagtgtgaagttgccggatgtgttgcatccggcatggcatttttatttgtggttggcgtgtttcagcttgaggttggaaatcccgtgacggtaacgttgctcaagggtttcgcggttggtcgctgtgacatccagatcacgcagcaagccgtcgtgaatgccgtaggcccagccgtgaatggtaactttctgcccgcgtttccacgctgattgcataatggtggagtggcccaggttatacacctgttccatgacgttcagttcacacaaggtatccagacggcgctcttgcggcatttcgccgagcaatgagctatgtttgaaccagatatcgcggatatgcagcagccagttgttgataagccccagttccgggttttcaactgcggcttgtacgccgccgcaaccgtagtggccacagataataatgtgttcaacttcgagtacatccactgcatactgaaccacggaaaggcagttcaggtcggtgtgaatgaccaggttagcaacattacggtgaacaaagagttcgcccggctcaagaccggttaaacgttctgcaggaacgcgactgtcggaacatccaatccatagaaagcgcggtttttgcgcttgtgccagtttctcaaaaaacccgggatcctcttccaccagcatttttgaccatagtgcattgttgctgatgagtgtatctatgtctttcatggaggttaacgacctgtaaccaaataattacgtttggctaatatagggcaactccgggacgatttaaaccacagataaagtgtaagaacgtaaggtaagtaaaaatttatgaccattgcactggaacttcaacagcttaaaaaaacctatccaggcggcgttcaggcgcttcgtggaatagatttgcaggtcgaagcgggtgatttttatgcgcttctcgggccgaacggggccgggaaatcgaccactatcggtattatcagctctctggtaaataaaacctccgggcgggtcagcgtatttggttacgatctcgagaaagatgtcgtgaacgctaaacgtcagttgggactggtgccgcaggaatttaacttcaacccgtttgaaaccgtgcagcaaattgtggtaaatcaggcagggtactacggtgtggagcgcaaagaggcgtacatccgcagcgaaaaatatcttaaacaactcgatctatggggaaaacgcaacgaacgtgcgcgtatgttatctggcgggatgaagcgccgtttaatgattgcccgtgcgttaatgcatgaacctaaactactgattctcgacgaaccgaccgcaggcgtggatattgaacttcgccgctcaatgtggggctttttgaaggatttaaacgacaaaggcaccaccatcattctcaccacacactacctggaagaagcagaaatgctgtgccgcaatatcggcattattcaacacggtgagctggtggaaaatacctcgatgaaggcgctgctggcgaagctgaaatcggaaacctttattctcgatctcgcaccgaaaagtccgttaccgaagctcgatggctatcagtatcgactggtcgataccgcgacgctggaagttgaagtgctgcgtgagcaggggatcaacagcgtatttacgcagttaagtgagcagggcattcaggtattaagtatgcgtaacaaagctaaccgtctggaagagctgtttgtttcactggttaatgaaaaacaaggagatcgcgcatgatgcatctttactgggtggcgctaaaaagcatctgggcgaaagagatccatcgctttatgcgtatctgggtgcagacgctggtgccgccagtcatcaccatgaccctttactttattatcttcggtaacctgattggttcgcgtattggcgatatgcatggcttcagctatatgcagttcatcgtaccggggctgatcatgatgtcggtgatcaccaatgcctacgccaacgttgcgtcatcattttttggtgccaagttccagcgtaatattgaagagctgctggtagcgccggttccgactcacgtcattattgccggatatgtcggcggtggcgtggcgcgtggtctgtttgttggcattctggtgacggcaatttcactgttttttgtgccgtttcaggtgcattcgtgggtattcgttgccttaaccctggtgctcacggcggtgttgttctcccttgcgggtttgctgaacggtgtgtttgccaaaacgttcgatgacatcagcctggtgccaacctttgtgttaacgccactcacgtatttgggtggggtcttttactcactgactttgttgccgccgttctggcaagggctgtcgcacctgaacccaatcgtttatatgatcagtggtttccgctacggcttcctcggtatcaatgatgttccgctggtcactacttttggcgtactggtggtctttattgtggcgttttatttgatctgttggtcgctgatccaacgtggacgtggtttgcgtagctaaggctatttcctctcctctggatttgggggagaggagttttgacggctatcaccctttatcaacaatggtcagggtagactgattttcggctaaggaggaaggcgatgttaggttgggtaattacctgtcacgatgaccgggcgcaagagatactggatgcgctggagaaaaaacatggggcgcttcttcagtgccgggccgtgaatttctggcgtgggttaagctctaatatgctcagccgcatgatgtgcgatgctctgcatgaagcggactctggtgagggtgtcatcttcttaaccgatatagccggagcgccaccgtaccgcgtggcttcattattaagccacaaacactcccgttgcgaagtgatttctggtgtcacgttaccgttaattgaacagatgatggcttgccgtgaaaccatgaccagttcagagtttcgcgagcgtattgtcgaactgggtgggccggaggtgagtagtctttggcaccaacaacaaaaaaatccgcctttcgtcctcaaacataatttgtatgagtattaacccacgattcttatagcgcttttgctacaataaaagcgttgtttcaccctcggttattttttcatgtacaaacaagctgttattctcctgctgatgctgtttaccgcaagtgtcagtgccgcgttacctgcccgttatatgcaaaccatcgaaaatgctgcgatctgggcgcaaattggcgacaagatggtgaccgtggggaatattcgggccgggcaaatcattgccgtggagcccactgccgcaagttattacgcatttaattttggctttggtaaagggtttatcgataaagggcatctcgagccagttcaggggcgacaaaaagttgaagacggtttgggtgacctcaacaagccgctgagtaatcagaacttaattacctggaaagatacgccggtctataacgcgccgagtgcgggcagtgcgccatttggggtactggcggacaatttgcgctacccgattttgcataaactgaaagacaggttaaatcaaacctggtatcagatccgtattggcgatcgactcgcctatatcagcgcgctggatgcccaacccgataatggcctgccggtgctaacctatcaccatattctgcgcgatgaagaaaacacccgttttcgccatacttcgacgaccacctcggtacgcgctttcaataaccagatggcctggctgcgcgacaggggatacgcgacactgagcatggcgcagctggaaggttacgtgaagaataagatcaatctccctgcgcgagcggtggtgattacctttgatgatggcctcaagtcggtgagccgctatgcgtatcctgtattgaaacaatatggcatgaaggcgacggcgtttgttgttacctcgcgcatcaaacgtcacccgcagaagtggaacccaaaatcgctgcaatttatgagcgtttctgagcttaacgaaattcgcgatgtttttgattttcagtcacatacccatttttgcatcgggtggatggctatcgccgacccatattactgagccgtagtgagcacaatattctgtttgattttgcacgttcacgccgcgctctggcgcaatttaatccgcatgtctggtatctttcgtatccgtttggcggatttaatgacaaagccgtgaaggcagcaaacgatgccggatttcacctggcggtgacaaccatgaaaggcaaagtaaaaccgggggataatccgttgttactaaaacgactttatatcttaagaacggattcgctggagacgatgtcgcggctggtgagtaaccagccgcagggataacaatcaagcaacctgtaccggaatcgctttcgcggtacgtttcatttcattgtcgccttcaaaataggcgacattgggtcgccaggtgcgagcttcttcatctggcatggtaacgaagctggcgatgatgacaatatcgccgacgctggcgcagtgggccgccgcaccgttaacagaaataattctcgaaccgcgttctgccgcgatggcataagtggagaaacgcttgccgttggtgacattccagatatcaatggcttcgttttcgagaataccggctgcgtcaaggaaatcctggtcaatggcgcaagaaccttcatagtgcaggtccgcatgagtcactttcacgcggtggagtttgccctgcagcatcgtgcgaatcataacttctacctttctaccctgtcgttaacgaagcaggcgatgcctgctttgaggaaattctcacgcagtattgcccgatttttgtttagtgtctactcatctgacggcatttacatcagcagtttgcgtaccgtgccgaagcgtgccatgtaacggctgtaaccaattgaaatttctctgaacgctgctcggtaaacactaaagaggtggctgacgatggcacgccttgactggatactgccttcacgcaagacaacacggaaggcagggaagatggatgcaccgagtaccacaccgcatgatgcagtgtttaaacaatttttaatgcacgcggagacggctcgcgactttctggagatacatttgccagtggaattacgagaactttgtgacctcaacacgcttcatttagagtcggggagtttcattgaagagagcctgaaaggacacagcacggacgtgctctattccgtgcaaatgcagggcaatcccggttatctgcatgttgtgattgaacaccaaagcaagccggataagaaaatggcctttcgcatgatgcgttattctattgctgccatgcaccggcatctggaggcggatcacgataagctgccgctggtggtgccgatactgttttatcagggcgaggccacaccttatccgctctcaatgtgctggtttgatatattttactcgccggagctggcacgacgcgtctataacagtcctttcccgctggtggatatcaccatcacaccggatgacgaaatcatgcaacatcggcggattgcgattctcgaactactgcaaaaacatattcgccagcgcgacttaatgttattgctggagcaactggtcacgctgattgacgaagggtacactagcggaagtcagttagttgccatgcaaaactatatgctgcaacgcggtcatactgaacaagcggatttgttttatggtgtgctgagagacagggaaacgggaggggagtctatgatgacgctggcgcagtggtttgaagagaaagggattgagaaggggattcagcagggaagacaggaggaaaggcaagaattcgccctgcgtcttctaagtaaaggaatgtctcgggaagacgttgcagagatgacaaatttatctcttgctgagattgataaggtaattaaccttatttaagttacctgtgttatgacagatgacgtggggtaaattaataactggcgccatcagccgtagcgccagttaagtattacgccagctcgaccattttgttgtcgatcaggcgagcatcgccaagccaggcggctaccagaattactgcccgtttgctggtttcagaaacttccagcaatgtgtcggcatcgcgaatctgaatatcatcggcgcggaagcctttttcattcagttcttgccccgcaatggtaataatttcatcgagatcccgttccccagcctgcaatttgtcagcaatcgaacttaaaactttgtacagaccaggcgcaattttgcgttgttccgccgtcagataaccgttacgggaacttagcgcaaggccatctttggcgcgcataattggcacaccgacaatctcaatatcgaagcccatatcggcaaccattttgcggatcagcgccagttgctgaaagtccttttcaccgaagcaggcgatgtccggctggaccaggttaaacagcttgctgacgatagtcgaaacgccgcgaaaatgccccggacggctcgcgccttccagcatggtcgaaagcccgggaacgtcaacgtaagtatgggtttcagtaccgttcgggtagatctcttttaccgaaggggcgaaaactaaatccactttacgtttgtttagcttctcgcagtcctcctgcaaggtccgtggataacgtgccagatcttccgggcggtcgaactgcatcgggttaacgaaaatactgacgacgaccacatcggcgcgggctttggcttcgtcgaccagcttcatatggccatcgtgcagattacccatagtaggcaccagcgccacgcgcttgccttccatacgcaggcggcgaatttgctgacgcagcagcggcagggtttcgataattaacacaacgtgactccttaatggaaactgtgttcttcgcccggataaacgccggactccacttcagccatatactgccgcacagccgcgcggatgtcgcccgtttcggcgaggaaatttttagcgaatttaggaatgtgaccgccggtaatgccgaaggcgtcgtgcatcacgaggatctgcccgtcagtgacgttgcctgcgccaatgccaataaccgggatcgccagtgcttcggtaatacgttttgccagttcaaccggcacgcattccagcaccagcagctgtgccccagcggcttctaaggctaatgcatcgctgagcagttgatcgcccgcttcatcgccgcgcccctgaactttgtagccaccgaaaatattcactgactgtggggttaaacctaagtgaccacatacaggaacggcacgttcggtcagcatttttacggtttcgaccagccactcaccgccctcaattttgaccatattggcaccggcacgcataaccgttgcggcgttttcaaaggcttgttccggcgtggcatacgccataaacggcaggtcagccaacagcaggcagtttggcgcgccgcgacgtacggcggcggtatgataggcgatatcctcgacggtaacgggaagggtggagtcgtggccctgaaccgtcatgcccagcgaatcgcctaccagcatgacgttaagtccttcatcagcaaatagtttcgcgaagctgtagtcgtaagcggtgatggtcgcgaaacgctttttatcctgcttacatttctgaagtgaagcaatggtggtcggtttcataacgtgtcctgataaatgatgtcgtgttgcctggcattttatcagtcacattggtgggggcaatgatttatcaattaccgcaccgccagatgatggcggtgcggtggacttattaagggtaggttacctggaaagtactggtggctttaaactcaccagcttctattggtatagttccatcctgttgtagcgtggcctggaaatggagagggtatgttatacctgtatcttgatccgggtaaactcctcctgttgtatcgtctttgcctctcgggtcgtaatctttataaacagaatttgaatcattaggtttcaatgtcattagaggatttttactagttgctaaaccttctatgagtacaccgactccttttgctgcgtcattacctgtgagagtattaccaaggagttgcccgttttcagtaccaacctttgttgaaactaattttgtctcaatattagtcacacgaacgcagttttgaagtgaaatatcaaaaggaaccggtgtggcaccgtttctgatttgttctgcactatattcacccatttttaccgtagaaccagtcacagaagttccactaagcatagcggtaaaacaagtgggattagtcaacttgacattgagcagatcgaaatcgattttgataaaataactatgctcatttataccttggcctgcgccataggctttaaatgaatacagataatttgatgagctggataatttgatctgttgagttactgttggatcaaagtttgtatctgtatagaattcaattgtaagggtctgataaataccacctacagcccagtatttacgggtgctattcgcattattgcaactccaatataacacgtcttcgcttggattataccacgaaaaatattgttctgcagagtcaccaatgtatatcccaggtgaactaacgttagttacggtaccgtaagctgaccacatgtttgaaattaataatgtgtaatacaaaccaggaactgatgtattaaataatttatgggagccatacattttacctgagtcaaccattgcattttcaatacgcattgcgctaccacttgtgctatcacttctgttgcaataaagaaaaccaccaccagaagcggtatctaactgactccactgtaattttacacctgtaggtccaagctgcgtcggtttgtagaaaactaaattatttgtacttgttgcatatctgaatatgacagtagcatcgccattcggccccgtttctctccatttttgatctgacggaccaacgccgtaactattcccaacaatatatcctacgttatcatcagtgccagcactcgcggtataacaactcaagcacagaattaaaaaaagaaaatgtctgaagaatttcttcattatcactccaccatctactgctgtaacagtcgcagttatttgttttgatctattattcgtagtacacatcaactaatatatgactcattacctggccagatatgacatccagcgcgggatcgattttttgcattctggcataaaatttccatgaagaattatgcagggcagaagtcattactggatacacggaacgagaatttcctgctgaactaataacattgaatatattggtcgggtcctgaatggaaaagagaacgacaccgacatttttagccccggttgcgacttcattggcaaatatttgccttgaacctgcagccatgacaccgctaagggctctaaaatcaatatgtaactgattaagcacatcgccagttccctgtaatgcacagtctgatactgtgacagtgaactcttttccacctggttgatagctttcaggagtaacattatctgaaaaatatcccaccccaacgacgccaagatcaatattaccctggttactgattccgcttttgcaagtgctgttttttacattggcaacaaggtcaatatcctgcccagcgatggctggataggtaatgggaaactgtagtgacagaaacagaattattctcttcatcagcttacgttgagtgggatgcatatatagttcctggatctgtcagtctgttagttataggttactgtaaatgtggcaggtgcagaaaatttacccgcagtgacattgcttacggttttatttttttcgacgaccagtcgagcactcatcggataataaacaaccgcgttggctgcattggagatagtgacctcttgagatgctggtgtcacacaactaaattgtgttgcgctccctgttgccggagtttcggtgctccagacttcaacggcgacggcacttgctttatctgcggctgtggatccatttgcgaaccccgcaccgtcattagcagtaccttcgcatgtggctcgcttggttaattttatttgtgcttttttattggggatacccgcacagtctttgaatttgagtttgaatgttttaactttggtcttggcattgatttcagaaatatatacatcgccaaagtcaacaacagaaatgtcctgatcagagtcatttactaatgtagcagtacaagtacctatttctacggtagtaatcacggtcagcccaatgctgtctgttgccgcataagagggtacgctgaacaatgaggcagccaaaacgacactgctggataatccataacgtaaatttttaaatgtcatcttaattatccttcttattgatagatgaaattaaacgttgccagtgcacgaaaattccccggtacgccttgccctgcatctgtttcacgtagcgcaacggtcatttcaagacccttatcgggctgcatctcgtctgtgctccagcgtatcttttccgcactgttaggtttaaggaaagtggcatcatcagtagtccgttttttgaaacccataccgatattacttgtcgtcgaagatgaatcaccagactgcggtataataagcttaggtgagcttgatgatgcatttccggtcagagtggtatcaatccaactgatgccactgctgcacccactagcaaccagtttaaaatcagcctgagattctgtcgttttattcgcgatcttatccagacccatcttagggattctcaatgtgtagttattattgccatcattcgtgacgttattaccagtaagtgtgatgttacaggttgtcgctttgacagtggctgtaaactctacattaatatccgttgcaaatactgatggtgataataatattcccatcagtatcgctattttatgtggcgttatttttatcatttgacgtcccttgtagttactgaatctgacaccgaattccattcagaataatagattgcgctattttttctgcttctgaactttgttgataatgcgcaagacaacttacgggtttactttcttcgagccatttaatgctgatatttccctgctgctcaataccacgaacaaatgcttgtccaccctgtccaacattaccaatgacattgcctttctcatcataaatatctgcagcaaatggaatatttttaccatcacttcgtgtgatgttcataatggctgattgcccttgcacggtttcaaaatcagcaaagacgactgaaccctgacgcggtacagctactgcactggtactttttaattcaacatcgttctcaagatcgttgatatccagcgcgatacggttttcatgataaggagaaagagcgctggtgacaccataaccccatcgatcgatagtactgttgccataatttattcgcgctccttgagcacctggagcctgaactaccgccagtgtatcggagtcgctaaaactgtcattactgaaggtcaggccgccgctatgcaatacaaaaccaccgtcggtgctgagagacacttgacgactgttatcgctatttgcagaaactgaacctgccagggttccccacggtgattcatagctggcataacccccaacataactcaaatctttgctggctttattcatcgtatagccagtatttacgctataactgacgcgagcgttatcactatagccactgctactgacgttgagttggttattacccttaaagtcactgctcatttgagtatcaatactctggaaacctgaagtccgttgttcagtgccaagtaatttttcaataggaatggtgaaactgagataaacgctatcgtcagtgtcgccgtcttcattccatgaacgctgggcactgacactgtagctgccccaggatgcactgttactgtagccaatagagtaattgctacgattttgtccggaagcccagtaatcggaccaacttccggaaagataaaatgaaccgtaatcttttttctcaaattttagcggttggttaatactgaccgtaacctgatttttcatgcgcgagtaattacgcatggatttcggttcaagatcttgttcgggatgtttcacttcatcaattagagttagtgcatcattaagaccaaggtaattctgtgtcgaatagcgataggccgcgatattcagtgaagtacttgtttcttcgaataacttgttccaggaaacacgataactttgtccctgatatgttttatcatccggtatacgaacattggagtgagtcacatcgaaagaaaatgcaccggctgaagtattcagaccaagacctaacaaaccagcggtatagttattatcggtaatctgaataccagtataacccgttagatagttattcagaccgtagtagtagctggcctgaaataaattaggctcatcctgaatatcatcttttaagacctggccgccgctaatatcccaacgtccaacgccagggcgtaacatttgaacgaccgatgaaaaaggttgcgagaatgtccgctttgagccatcggattcttcgacagtaacaataagatcgctgccgtaacctgacggactcagatcatcaatgacgaacgcgcctggcggcacagtcgtttcataaatcttatagccaccttgcataatagtgactttggcgttggtattagcaacgccatgaatgataggcgcaaaactcgctaatgtcggaggcaacatgcggctgtcgctgtataaacgaatgccgcggatactgacagaatcaaaggtttcgcccgttgtataagactcaccaagaatgagttgagaacgcagcgaggcgatatcacgctgtatataccgattcttaaaatcataattactgccagaatcggtcatccagttgtagttgcctgaggcacgcagtcgccatgcacctaaattcatcccaccgttaaaagcagcataaatgctgtcatttcttcgaccaggagtttcactatgatatccgttgaggttgtatgacaacatggccgcattaatgccattttcccataacgatggatcaacatagttttggtaatttttcattacccatgcctgaggaacgtctatatccagacgttgctcgttaacgtcataacgaacagaagcctgagggataatttccgtcaaattaaggcaattgccgagtgtttcatccctggcaagcagaacggctttttcgttatttatatcgggagaatttatatgaaactgcaataaattcttaagtgtgatacaggcttgtgcgttttttttccttcaatttcaataaatgtaatgctttggttaataataggttgatcgttgacataaacactgacgtcgtacatacccggtatagcagggttaccttcactataccggctgagatcaatatttgaggcattctgccccatcaggaaggtatggtcatattcaacaagttcagcacagaaagcactattgcaatacagcagcgcgcaaaacgtagcgatacgggtcagatgattatgataatttttagttggttttatagtcacgttatgcttcctgcggaattatatccttgcctgattacagactggcattaccttcaatggcgccaccaaaatcattaatggcgtaaaaatgtacttttgcagaacttgctttgccattaaggccagtgactttcatgacctcatcactaaatggtgcaatcattttcacatcaatcggatagcgtttaccgctagcttctaaatcaccactgctaaaagagacgtagtaaggggttggattggtcactcgcaatgacgccttaccttctgaacctgaccagaaccacttcagggctaacggggcttcagagggatttcccttcaatccatccgggcgatagaaaagttttatacgtgtgcgaaatgccagttgcagcagactttgattcgcgaccttttctgcatctggttttggtggaacttccagtacgttaaaccagaacacgctctctctgtctttaggcagtgaggtgctggctgtgtacattaatttgattgtttgcccacgtttggcatcaatacgcgatactggcggcgtggcagtaaaagggactgtaatactgccaggctcagcgttgtcatcgccagtatctaaccaactctggacaagcaacgggttattccctttattttccagacgtacgttgacacttttttgatcgcttttatatattacgcgagtacccgaaatgacaatgtccgcaatagacgatgaactaaaagccatacaggttacgaagcataaagctgttgtatgtttggtgttaaaaaacataaaccatccctgacagagttaattaaaacagggaataatataaaaatagaaattattaacactattccctgtatattcattcaatcaatttaattggtgaatacttactgataagtaatggtgtatgcagtgttagtttttacataaccagcagttgctgtttggtctgcgacggcacgaacgtaagacgctttaaaatcataaacagcagattttgtcgttgcatccagggctttagtatacacatcgccagggttgttaatttgaacctgtttgatagtggaaccatcaatattgtgcagagcgatattcacgccgtcagacgggttgttaatagacatgtcgttgttcagcgttcctttgctattaccaaagaaaacagaaccgaaggtcattttagctgtactacctggattcggatttgctttgctgcagtcaacggtgatgctgaaaggtttggctttagcgccaacggtgtcattcagcacgccagcatcgatttcaccaacagttgcagtttgcagcaggatcagaccatctttattaccgccgtcaacgcgggtttcacaggtgttatcaacaaccagaccactgatatttaactgaccaccatccatatcagcagaagcagtacctgcaaccattgccagcataagaccagacagggcaaaacctaattttttagacataaaaatccttgaataaaattccattagtcagactactggtttgaagaatgactattcatgacacaaatgttataagcagatgctagatattaatgagcaatgatatttgttaccaaaatttacaaccattgttcattaggacgcctattgtgcactttaagggcttttgaacaaattaaattttcttaattcaaaattaagcaaaaataaattcacaagtgcaattggttagggtatggcgatgggattgatatttatctgcgggaatttatattatgtttctgcaaaaatgtttaaactaaaatttttattaaggaaagagaggatgtatgattttcagaaaatatttatattcgtaatataaataaattaccatttgcttaatttgtcaaatgctcttgtatgtaagacttcacgcaacgtctccccatcaggaaacgccagctccggtgcaatctcaaacagcggccacagcataaatccacgattcttcatatcgtagtgcggaacggtcaggcgttcggtatttatcacttcattaccaaacagcatgatatcgagatccagcgtgcgtggtccccagcgttcagctttacgaacacgaccctgttgcagttctatgcgctgtgtatggttgagtaactcttccggggcgagcgaagtttcaagcgccacggcggcgttgaggtaatcgggttgatcttgcggccccagcggtggggtgcggtaaaacgaagaaacggcaagaatgtggctttcagggatatcgcctaatgctttcagggcagcattgacctgctccagcggagaggccagattgctgcctatggcaatatacgccactgtcatgcggtaccctcacgacgcggtgcgcgtttgcgtggacgacgagtacggcgacgcggtgacggctcttcatccaactcgttaagcatccctttttgatctggtggcgcggaaacctggaactcaccccaccatttcaccagacgctgcagttcagcgttacgttcaacttcagctcgcaaggccaacaggtcataagccgcacggaacttaggatgctccagcagtttccatgcgcgtttaccctgacgacgggacatacgcaactgcaactgccagatatcgcgggttaacgtcgtcagacgtttcgggattgccagtgaacggcaggcttcgtccagcacgtcgttcatcgccagcgcgaaagcgtcgtgataggtcaggccgctttcctgggcaatcttctgtgccgtctccagcagtgggtaccagaacatggcggcaaacaggaacgccgggttcacgcgcatatcgttatggatacgcgtatcggtattcttcagcacctgttcaatgatccgctccatcgggctgtcgccattttccgtgaagtagcgggtaatggtcgggaacagcggctggaacagatgatattcacacaacagcttataggtatcgtaaccgtagcccgcttgtagcagtttaagcgattcttcaaacaggcgtgccggtgggatatcgttcaacagggtagcgaggcgagggatcggttctgcggtttccgggctgatgcgcatacccaatttggcggcaaaacgtaccgcgcgcagcatacgtaccggatcttcacggtagcgcgtttccgggttaccaatcagacggataacgccgtccttcagatccttcataccgccaacgtaatcacggacggtaaaatccgctacgctgtaatagaggctgttgatagtgaaatcgcggcgctgggcgtcttcttcgatggagccgaaaatgttgtcgcgcagcaacatgccgttttgcccgcgttgggaggtcgtgcggtcgctgacgttaccttcgtggtgtccacggaaggtcgcaacttcgataatctccgggccaaacattacatgagccagacggaaacggcgacccaccaggcggcagttacggaacagtttgcgcacctgctcaggcgtggcgttagtggttacgtcaaaatctttcggctttttgccaagtaacaggtcgcgcacgccgccgccaaccagccaggcttcgtatcccgctttgttgagcctgtacattaccttcagggcattttcactgatatctttgcgggaaatagcatgctgctcacgcgggatcaccgtcacctgtggacgggcgactgcctgttcagcctcgctttcctcgcggcttagcaccttgcggcaaaaattagcgactcgggtaaaaatagtacacctcggtagtgtcaaacatcattcaggacaaaaaaatagcggctaatcatagctcagcatgacgcatttgagaatgttgaatttacaattgccgactcgggcacggcggtaagccgccagtttttgacggctgactgaaggatttgctcgacgctgaaatcctgccagtgtgcttctgcctgctgccccagaaattgaagtgccgcgattagtaccgggcgtggatcgcctttcggcaacgcaggcgcatgattctgcttggaaagtttagcgccttgtggattaagcgccagcggcagatgaatgtaatctggcactttccagccaaaaagctggtacagcgagatttgccttactgttggttcaatcagatcagccccacgcactatttctgtaacgccctggaaatgatcatcaaccacaacagccaggttgtaggcgaacaacccatcacggcgatgaatgataaaatcttcccgtgccagtttttcgtcggcgtgaataatgccgcgcagctggtcagtaaattgcgtgaccggatgctgctggcggatacgcactgcggcattgtctggtccatgatgcaacacccggcaatgaccgtcgtaaataccgccaatgctttgaatacgcgcacgcgtacaggtgcagtaataacttagtccttgttcatgtaaccaggcgagtgcttcacgataggcgtggtgacgttgcgattgccagagaacatcgccgtcccagtgcagaccgtaatgttccagctggcgcaggatagtttctgcggcaccgggaacttcacgaggcgggtcgatatcttctatgcgtaccagccagcgaccttgccgggcgcgagcctgcaaatagctgccgagcgcggcgatcagagagccaaaatgaagctcgccggaaggagagggggcgaagcggccaatatactgtgtgtctgtcatctctttgaacaaaaataaggcgggagcatttcccgcctgtggtaaacgtgatggaacggctgtaattagccagccatctgtttttcgcgaatttcagccagcgttttgcagtcgatgcacagatcggctgtcgggcgcgcttccagacggcgaataccaatttcaacaccgcaggattcgcagtagccgaaatcttcgtcttccacttttttcagcgtcttctcgatctttttgatcagcttacgctcgcgatcgcggttacgcagttcgaggctgaactcttcttcctgggctgcacggtctaccgggtccgggaagttggctgcttcatcctgcatatgtgtaacggtgcgatcgacttcatccctgagttgattacgccatgcttccagaatacgacggaagtgcgccagctgggcttcattcatatactcttcgcccggcttctcctgatatggttccaccccagcgatggcgagaatactcagggacgatgttttacggttttgcccttcttgcatgttgcttctccttaacacgcactatcgatccccatgttcgggggaaaaatgaggccgctataaatagcagatgcttttccggatagcaattatctaaacgtaacacttgacaactgtgtgaggaaaagcgtatttgcgcacgcgaccagaatgtaaattaaccagttacttactttactacaatgtaaccggcagtgattttttaagagccatgccttcagcagaaatttccgctttgtaagccagaatttctacccccctctgttgagcttctgacaatagttgcgcgtatttctcatcgatgtggcgcgcgggtgaaaaccgtgtaatggctgaatgcagcacggcgaaaaagataaccgcacgctggccttcagccgctacgctcatcaactcccgaaggtgtttctgacctcgttcagtgaccgcatcgggaaaatatccctgttcgttctccgctaacgtaaccgatttcacttcaatatagcagtctggacgcgaatccgcctgcaacataaagtcaatacggctgcgttctgcgccgtattttacttcgcttttcagcgagctatagcctgacagttctgaaattgattcattaaggatagcctctttcgtcaacctgttagcccaaagcgtgttgacgcaaataaatgcgccgctctggctttgagttaattcccaggtgtgtgggtatttccgtttggtgttgtctgaagtcgaataccagacggtatcgccaggcgttgcacaaccggtcattgcacccgtattcgggcagtgtagcgttaattcgcgaccatcgggtgtgatcacatcggctaaaaaacgtttgtaacgctgaattagcgtcgcgcgctgtagagggggagagaattccattgcgacaatccttgttattgcgttagcgcccagcgttttagcggcgtgtagcgtgtgcgtccacgggcaaacgaggaggcgtaaagggtgaactccgtcaccgcataagaccagttaaaacctggcggcgggattgtcaccgcctcgctggcgtcgcgcaataaggtaatatgtggatgaaacggacgattgctttgaaaacaaccgctgcgggcagcctgtgaacggagcatattcgccagctggattaagccgcgtggcggctgacgcatccctaaccacaccacacgcgaacgcagccattgtccggcgtcatcaagcgtgagtgtgaaaccaggttgacgaatccgtccggctaaaagagaaagcgccttctctttctcggcgctcacttcgcctaaaaatgccagagtcagatgcaaattatcggcggcgaccggacgtcccgcctcaggtgggaagtgtgtggcgcgccaatggataatctgttcgcggatttctgcaggtaagtcgatagcaaagaacagacgttgcggttcagacatgtgaggcactcggttatgaattaccgcgatgctacaatgtggcgcgaagaatgttaaccctctggagcgttttgtgtcgtcgttgcccgttgctgccgtcttatctgaattacttaccgctctcgattgtgcgccgcaggtattattaagtgcgccgaccggggccgggaaatcaacctggctgccgctgcaactgctggcgcatcccggcattaacgggaaaattatcctgctggagccgcgtcgtctggcggcgcgtaacgtcgcgcaacggctggcggagctgcttaacgaaaagccaggcgataccgttggctaccggatgcgtgcgcaaaactgcgtcgggccgaatacccgcctggaagtggttaccgaaggcgtgctgacgcgcatgatccagcgtgacccggaactgagcggtgttggactggtgatccttgatgaatttcatgagcgcagcttgcaggcggatttggcgttggcgctgttactcgatgtgcaacaaggtctgcgtgatgaccttaaactgctgattatgtcggctaccctggacaacgaccgcttgcagcaaatgctgccagaagcgcctgtcgtcatctcagaagggcgctcgtttccggttgaacgccgttatttaccgctgcccgcgcatcagcgttttgacgatgccgttgcggtagccaccgctgaaatgctgcgtcaggaaagcggatcattactgttatttttacctggcgtcggagaaattcagcgtgtgcaggaactactggcttcgcgcatcggcagtgatgtattgctctgcccgctgtatggcgcgttgtcgctgaacgatcagcgaaaagcgatcctcccggcaccgcaagggatgcgcaaagtggtgctggcgaccaatattgctgaaaccagtttaaccattgaaggtattcgtctggtggtggattgtgcccaggagcgtgtggcgcgttttgatccgcgcacggggcttacgcgactgattactcaacgcgttagccaggcatccatgacgcagcgtgccgggcgcgccgggcgtctggagccgggtatctgcctgcatttaatcgccaaagaacaagcagaacgcgccgcggcgcaaagtgaaccggagatcttacaaagcgatctttccggtttgctgatggaattactgcaatggggatgcagcgatccggcgcagatgagctggctggatcaaccgccagtagtgaatctactggccgcgaaacgtctgttacaaatgctgggggcactggagggtgaacggcttagtgcgcaagggcaaaaaatggcagcgctgggtaacgatccgcgtttagcggcaatgctggttagcgcgaagaacgacgacgaagctgctaccgcggcaaaaattgccgccattctcgaagagccgccacggatgggcaatagtgacctgggcgtggcgttttcgcgcaatcaaccagcctggcagcaacgtagtcagcaactgttaaaacgcttaaacgtacgtggcggtgaggcagacagttcgcttatcgcgccgctacttgccggggcgtttgccgatcgcattgctcgtcgccgtgggcaagatggacgctatcaactggcaaacggcatgggagcgatgctcgatgccaacgacgcgctaagccgccacgaatggttgatcgcaccgttattattgcagggcagcgcctcgccggatgcgcggattttactggcgctgctggtcgatattgatgagttagtacaacgctgcccgcagctggtacagcagtctgacactgtggagtgggatgacgcgcaaggtacgctgaaagcctggcgtcggctacaaatcggtcagttgacggtgaaagtgcagccgctggcgaaaccgtcagaagacgagttgcatcaggcgatgcttaatggcatccgtgataaaggtttaagcgtgctcaactggacggcggaagcggaacagctacgcttgcgtttgttatgcgccgcaaagtggttgccggaatatgactggccagcggttgatgatgaaagtttattggcagcgctggaaacgtggctgctgccacatatgactggcgtacattcactacgcggcctgaaatcactcgacatttatcaggcactacgcggattacttgattggggaatgcagcaacgtctggatagtgaattgcctgcgcattacactgtgccgacgggaagccggatcgccattcgttatcatgaagataacccgcccgcgctggcggtgagaatgcaagagatgtttggcgaggccaccaatccgacgatcgcccaggggcgcgtgccgctggtgctggagttgctttcacctgcccaaaggccgctgcaaatcacgcgtgatttgggggccttctggaaaggggcgtatcgtgaggtgcaaaaagagatgaaagggcgttatcccaaacatgtctggccggacgacccggcaaatactgcaccgacgcgacggacgaaaaagtattcgtaaggttggttttctccctctccctgtgggagagggccggggtgagggcatcagcgcgcacgttcaccctcaccctaaccctctccctcaagggagaggggaccgatcgagcacaaattttgagagatatcttcttctgtcttgtaacagaagaacagaaaatcgggcttttgcgcctgaatattgcggagaaaaagcatggccgggaatgaccgcgagccaattggacgcaaagggaaaccgacgcgtccggtcaaacaaaaggtaagccgtcgtcgttacgaagatgacgatgattacgacgattatgatgactatgaggatgaagaaccgatgccgcgcaaaggtaagggcaaaggcaaagggcgtaagcctcgtggcaaacgcggctggctatggctactgctaaaactggctatcgtttttgccgtgctgatcgccatttacggcgtttatctcgatcaaaaaattcgtagccgtattgatggcaaggtctggcaactgcctgcggcagtttatggccgaatggtcaatcttgagccagacatgaccatcagcaagaacgagatggtgaagctgctggaggcgacccagtatcgtcaggtgtcgaaaatgacccgtcctggcgaatttaccgtgcaggccaacagcattgagatgattcgccgtccgtttgatttcccggacagtaaagaaggacaggtgcgcgcgcgtctgacctttgatggcgatcatctggcgacgatcgtcaatatggagaacaaccgtcagttcggtttcttccgtcttgatccgcgtctgatcaccatgatctcttcgccaaacggtgagcagcgtctgtttgtgccgcgcagtggtttcccggatttgctggtggatactttgctggcgacagaagaccgtcatttttacgagcatgatggaatcagtctctactcaatcggacgtgcggtgctggcaaacctgaccgccggacgcacggtacagggtgcgagtacgctgacgcaacagctggtgaaaaacctgttcctctccagcgagcgttcttactggcgtaaagcgaacgaagcttacatggcgctgatcatggacgcgcgttacagcaaagaccgtattcttgagctgtatatgaacgaggtgtatctcggtcagagcggcgacaacgaaatccgcggcttcccgctggcaagcttgtattactttggtcgcccggtagaagagctaagcctcgaccagcaggcgctgttagtcggtatggtgaaaggggcgtccatctacaacccgtggcgtaacccaaaactggcgctggagcgacgtaatctggtgctgcgtctgctgcaacagcaacagattattgatcaagaactctatgacatgttgagtgcacgtccgctgggtgttcagccacgcggtggggtgatctctccacagccagcctttatgcaactggtgcgtcaggagctgcaggcgaaattaggcgataaggtaaaagatctctccggcgtgaagatcttcactacctttgactcggtggcccaggacgcggcagaaaaagccgccgtggaaggcattccggcactgaagaaacagcgtaagttgagcgatcttgaaactgcgattgtggtcgtcgaccgctttagtggtgaagttcgtgcgatggtcggtggttctgagccgcagtttgcgggctacaaccgtgcgatgcaggcgcgtcgttcgattggttcccttgcaaaaccagcgacttatctgactgccttaagccagccgaaaatctatcgtctgaatacgtggattgcggatgcgccaatcgcgctgcgtcagccgaatggccaggtctggtcaccgcagaatgatgaccgtcgttatagcgaaagcggcagagtgatgctggtggatgcgttgacccgttcgatgaacgtgccgacggtaaatctggggatggcgctggggctgcctgcggttacggagacctggatcaaactgggcgtaccgaaagatcagttgcatccggttccggcgatgctgctgggggcgttgaacttaacgccaatcgaagtggcgcaggcgttccagaccatcgccagcggcggtaaccgtgcaccgctttctgcactgcgttcggtaattgcggaagatggcaaggtgctgtatcagagcttcccgcaggcggaacgcgctgttccggcgcaggcggcgtatctgacactatggaccatgcagcaggtggtacaacgcggtacgggtcgtcagcttggggcgaaatacccgaacctgcatctggcagggaaaacagggactaccaacaataacgtagatacctggtttgcaggcattgacggcagcacggtgaccatcacctgggtaggccgtgataacaaccagccgaccaaactgtatggagccagcggggcaatgtcgatttatcagcgttatctggctaaccagacgccaacgccgctgaatcttgttccgccagaagatattgcagatatgggcgtggactacgacggcaactttgtttgcagcggtggcatgcgtgtcttgccggtctggaccagcgatccgcaatcgctgtgccagcagagcgagatgcagcagcagccgtcaggcaatccgtttgatcagtcttctcagccgcagcaacagccgcaacagcaacctgctcagcaagagcagaaagacagcgacggtgtagccggttggatcaaggatatgtttggtagtaattaacatctaagcgtgaaataccggatggcgagttgccatccggtaaaataacatcccatctaagatattaaccctttcttttcatctggttgtttattaacccttcaggaacgctcagattgcgtaccgcttgcgaacccgccagcgtttcgaatattatcttatctttataataatcattctcgtttacgttatcattcactttacatcagagatataccaatggcgcgttccaaaactgctcagccaaaacactcactgcgtaaaatcgcagttgtagtagccacagcggtaagcggcatgtctgtttatgcacaggcagcggttgaaccgaaagaagacactatcaccgttaccgctgcacctgcgccgcaagaaagcgcatgggggcctgctgcaactattgcggcgcgacagtctgctaccggcactaaaaccgatacgccgattcaaaaagtgccacagtctatttctgttgtgaccgccgaagagatggcgctgcatcagccgaagtcggtaaaagaagcgcttagctacacgccgggtgtctctgttggtacgcgtggcgcatccaacacctatgaccacctgatcattcgcggctttgcggcagaaggccaaagccagaataactatctgaatggcctgaagttgcagggcaacttctataacgatgcggtcattgacccgtatatgctggaacgcgctgaaattatgcgtggcccggtttccgtgctttacggtaaaagcagtcctggcggcctgttgaatatggtcagcaagcgtccgaccaccgaaccgctgaaagaagttcagtttaaagccggtactgacagcctgttccagactggttttgactttagcgattcgttggatgatgacggtgtttactcttatcgcctgaccggtcttgcgcgttctgccaatgcccagcagaaagggtcagaagagcagcgttatgctattgcaccggcgttcacctggcgtccggatgataaaaccaatttcaccttcctttcttacttccagaacgagccggaaaccggttattacggctggttgccgaaagagggaaccgttgagccgctgccgaacggtaagcgtctgccgacagactttaatgaaggggcgaagaacaacacctattctcgtaatgagaagatggtcggctacagcttcgatcacgaatttaacgacacctttactgtgcgtcagaacctgcgctttgctgaaaacaaaacctcgcaaaacagcgtttatggttacggcgtctgctccgatccggcgaatgcttacagcaaacagtgtgcggcattagcgccagcggataaaggccattatctggcacgtaaatacgtcgttgatgatgagaagctgcaaaacttctccgttgatacccagttgcagagcaagtttgccactggcgatatcgaccacaccctgctgaccggtgtcgactttatgcgtatgcgtaatgacatcaacgcctggtttggttacgacgactctgtgccactgctcaatctgtacaatccggtgaataccgatttcgacttcaatgccaaagatccggcaaactccggcccttaccgcattctgaataagcagaaacaaacgggcgtttatgttcaggatcaggcgcagtgggataaagtgctggtcaccctgggcggtcgttatgactgggcagatcaagaatctcttaaccgcgttgctgggacgaccgataaacgtgatgacaaacagtttacctggcgtggtggtgttaactacctgtttgataatggtgtaacaccttacttcagctatagcgaatcgtttgaaccttcttcgcaagttgggaaggatggtaatattttcgcaccgtctaaaggtaagcagtatgaagtcggcgtgaaatatgtaccggaagatcgtccgattgtagttactggtgccgtgtataatctcactaaaaccaacaacctgatggcggaccctgagggttccttcttctcggttgaaggtggcgagatccgcgcacgtggcgtagaaatcgaagcgaaagcggcgctgtcggcgagtgttaacgtagtcggttcttatacttacaccgatgcggaatacaccaccgatactacctataaaggcaatacgcctgcacaggtgccaaaacacatggcttcgctgtgggctgactataccttctttgacggtccgctttcaggtctgacgctgggcaccggtggtcgttatactggctccagctatggtgatccggctaactcctttaaagtgggaagttatacggtcgtggatgcgttagtgcgttatgatctggcgcgagtcggcatggcgggctccaacgtggcgctgcatgttaacaacctgttcgatcgtgaatacgtcgccagctgctttaacacttatggctgcttctggggcgcagaacgtcaggtcgttgcaaccgcaaccttccgtttctaatttctcttttggggcacggatttccgtgcccatttcacaagttggctgttatgcaggaatacacgaatcattccgataccacttttgcactgcgtaatatctcctttcgtgtgcccgggcgcacgcttttgcatccgctgtcgttaacctttcctgccgggaaagtgaccggtctgattggtcacaacggttctggtaaatccactctgctcaacatgcttggccgtcatcagcctccgtcagaaggggagattcttcttgatgcccagccgctggaaagctggagcagcaaagcgtttgcccgcaaagtggcttatttgccgcagcagcttcctccggcagaagggatgaccgtgcgtgaactggtggcgattggtcgttacccgtggcatggcgcgctggggcgctttggtgcggcagatcgcgaaaaggtcgaggaagctatctcgctggttggcttaaaaccgctggcgcatcggctggtcgatagtctctctggcggcgaacgtcagcgggcgtggatcgccatgctggtggcgcaggatagccgttgtctgttgctcgacgaaccgacctcggcgctggatatcgcccaccaggttgatgtgctgtcgctggtgcaccgtttaagtcaggagcgtggcctgacggtcattgccgtgttgcacgatatcaatatggcggcacgctactgtgattatctggtcgccctgcgcggcggtgaaatgattgctcagggaacgcctgcggaaattatgcgcggcgaaaccctcgaaatgatttatggcatcccgatgggtattttgccgcatccggcgggtgctgcacctgtgagttttgtttattgatgagcggcttacctcttatttcgcgccgtcgactgttaacggcgatggcgctttctccgttgttatggcagatgaataccgcccacgcggcggctattgatcccaatcgtattgtggcgctggagtggttgccggtggaattactgctggcgctcggcatcgtgccttacggcgtggcggataccatcaactatcgcctgtgggtcagcgaaccaccattgccggactcagtgatcgacgtcggtttgcgcacagaacctaaccttgaactgctgaccgaaatgaaaccatcgtttatggtctggtcggcaggatatggcccttcaccagaaatgctggctcgtattgcgccggggcgtggatttaacttcagcgacggcaaacagccgctggcgatggcgcgtaagtcactgacggaaatggcagatttacttaacctgcaaagcgcagcagaaacgcatttagcgcactatgaagactttatccgcagcatgaaaccccgctttgtgaagcgtggtgaacgcccgttattgctgacgacgcttatcgatccgcgccatatgctggttttcggtccaaacagcttgtttcaggaaattcttgatgagtacggcatcccaaatgcctggcaaggggaaaccaacttctggggcagtaccgccgtcagcatcgatcgtctggcggcgtataaagatgttgatgtgctctgttttgatcacgacaacagcaaagacatggacgcgctaatggcaaccccgctgtggcaggccatgccgtttgtccgcgccggacgctttcagcgcgtacccgcagtctggttttatggtgcgacgctctcggcaatgcactttgtgcgcgttctggataacgccatcggaggtaaagcgtgagtaaacgaattgcgctttttccggcgttattgctggcgctgctggtgattgtcgctacggcgctgacctggatgaacttttcgcaggcgctgccgcgtagccagtgggcgcaggccgcctggtcgccggatattaacgtcatcgagcagatgatttttcactacagcttgttaccacgtctggcgatttctctactggtgggcgcgggcctggggctggtgggcgtgctgtttcagcaagtgctgcgtaacccgctggcggaaccgacgacgttgggcgttgctacaggcgcgcaactggggattaccgtcaccacgctctgggcgatcccaggtgctatggcgagccagtttgctgcgctggcaggggcttgcgttgttggcttaattgtctttggcgtcgcgtgggggaaacggctgtcgccggtaacgctgattctcgcggggctggtagtgagcctttattgtggggcaatcaatcagttactggttatcttccatcatgaccagttgcaaagcatgttcctgtggagcaccggaacgctgacgcaaaccgactggggcggcgttgagcgtttatggccgcagttgctgggcggcgtgatgctgacgttactgctacttcgtccgttaaccctgatggggcttgatgatggcgtggcgcgcaatctcgggctggccttgtcgctcgcgcgtctggcggcgctgtcgctggcgatagtcatcagtgcgctgctggtgaacgcagtggggattatcggctttatcgggttgttcgcgccactgctggcaaaaatgctgggggcgcggcgtttgttgccacggttgatgctggcgtcgctgattggtgcgttaattctgtggctttctgatcaaatcatcctctggctgactcgcgtgtggatggaagtttccaccggttcggtcactgcgttgatcggtgcgccgctgctactgtggctgctgccgcgtttacgcagcattagcgcgccggatatgaaggttaacgatcgtgtcgcgactgaacgccaacatgtgctggcgtttgccctcgcgggcggcgtgctgctgttgatggctgtggtggtggcgctgtcgtttggtcgtgatgcgcacggctggacgtgggcgagcggggcgctgctcgatgatttaatgccctggcgctggccgcgaattatggcggcgctgtttgcgggcgtcatgctggcggtagcgggctgtattattcagcggctgaccggcaacccgatggcaagcccggaagtgctggggattagctccggcgcggcgtttggtgtggtgttaatgctgtttctggtaccgggtaatgcctttggctggctgttacccgcaggcagtctcggggcggcggtgacgctgttgatcattatgatcgccgccggacgcggtggattttccccacaccgcatgttactggcggggatggcgttaagtaccgcgttcaccatgcttttgatgatgttgcaggcaagtggtgacccgcgaatggcgcaagtgctgacctggatttccggttcgacctacaacgcgaccgatgcgcaggtctggcgcaccggaattgtgatggtgattttgctggcgattaccccgctgtgccgccgctggctgaccattttaccgctgggtggtgataccgcccgagccgtaggaatggcgctgacgccgacgcgaattgcgctgctgctgttagcggcttgcctgacggcgaccgcgacgatgactattggaccgttgagttttgttggtttaatggcaccgcatattgcgcggatgatgggctttcgacggacgatgccacacatcgtaatttcggcgctggtggggggtttactgctggtgttcgctgactggtgtgggcggatggtgctgtttccattccagatcccggcggggctgctgtcaacctttatcggcgcgccatattttatctatttgttgagaaagcagagccgttaattgaatgcctcgcccggtgggcgaggcaaaatcatcacaacttcgcaaacacccgacgtgcagcatcgatggtgttattgatatcttccatgctgtgcgccacggacataaagcccgcttcaaacgctgacggtgccaggtaaacaccttcatccagcatcatatggaagaaacgcttaaagcgttccacgtcacaggccatcacatcctgatagcacgtcacggactcggcgtcggtaaagaaaataccgaacatgccgccaacgtggttaacgaccagcggaattccggcttcttctgccgcttccagcagaccttctgccagacgtgatgtcagctcatccaacgtttcgtgaacgcccggttgcgcgacttcattcagacaggcgaaacccgctgccatcgcaattgggttaccggaaagcgtacccgcctgatagaccggacccgtcggggccagcgcatccattacatcacgacgaccaccgaatgcgcctaccggcattccaccgccgatgattttgcccaggcaggtgagatccggttccacaccgtaataatcctgtgcgccagctagcgctacgcggaagccagtcattacttcatcgatgatcagcaatgcgccaaattcgtcgcacagcgcgcgcagacctggcaggaactctggcagcggtggaacgcagttcatattgcctgccaccggctcgacgataatacaggcaatctcttgcgggtattgctcaaacgcggcgcgtacagaagccagatcgttataagtacaggttaaggtatgtttggcgaaatctgccggaacacccggcgagtttggctggcctaacgtgagtgcgccagaaccggctttcaccagcaggcagtcagcgtgaccgtggtaacaaccttcaaatttaatgattttgtcgcgaccggtaaaaccacgggccaggcggatggcgctcatggtcgcttcagtgccggagttcaccatgcgcaccatatccatggtcgggaccagttcggtcaccagttgcgccattttcacttccatttcggttggtgcaccaaagcttaaaccacgctcggcggcttcaatcacggcattgcggatcgccggatggttatggcccagcaccatcggcccccaggaaccgacataatcgatataggctttgccatcaacatcgtacagataggcgccgtccgctttttcgataaacagtggagtgccgcccacgccagtaaaggcgcgaacaggggagttcacaccgccagggatcagctcgcgcgctgcgctgtaaagattttcagacttactcatggagggttcctgattcgtagaaaaagtgaatggctgctattctatgttattcataacaagttaaatactcgtcaaacatcaggctgcttgtactggtgcaatcctgatttcttagagtataaaagttttgtgcatttgaaacattacgctttgcaaaggattttcatggaacgtgcgagtaaaatgccgtcatcttatttgtatgaccaataagtgatcattggatgaaaactgatactccctctttagaaacaccgcaggccgcgcgcctgcgacgcagacaactgattcgccaacttcttgagcgcgataaaaccccgttagccattttgtttatggcggcagtcgtcggcacgcttgtcgggctggcagcggttgcttttgacaaaggtgtcgcctggttgcagaaccaacgtatgggggcgctggtacatactgctgataattatccgctactgttaaccgtcgcttttctctgttcggcggtgctggcgatgttcggctactttttggtgcgcaaatacgcgcccgaagcagggggatcggggatcccggaaattgaaggggcgctggaagatcaacgtcctgttcgctggtggcgtgtattgccggtgaaattctttggcgggctggggacactcggcggaggcatggtgctagggcgcgaaggaccaaccgtgcagatcggcggcaatatcggtcgcatggtgcttgatattttccgcctgaaaggtgatgaagctcgccatacgctgctggcaaccggtgctgctgcggggctggctgcggcctttaacgcgccgctggcgggtattttgtttattatcgaagagatgcgtccgcagtttcgctatacgttaatttcgattaaagcggtatttattggcgtcattatgtcgaccattatgtaccggatttttaatcatgaagttgcgttgattgacgtcggtaaactttctgatgcgccgcttaatacgctgtggctttatctgatcctcggtattatttttggcattttcggccctatttttaataaatgggtgctggggatgcaggatttgctgcaccgtgtgcacggcggcaatattaccaaatgggtactgatgggtggtgcgattggcggtctgtgtggattgctggggtttgtggcaccagcaacgtcgggcggcggttttaacctgattcctatcgctaccgcggggaatttcagcatgggaatgctggtgtttatcttcgtcgctcgggtcattaccaccttactctgcttctcttccggcgcgccgggcggtatttttgccccgatgctggcgctgggtactgtgctgggaaccgctttcggaatggttgccgttgagctgtttccgcaatatcacctggaggcggggacgtttgctattgccggaatgggggcattactggcggcatctattcgcgcgccgttaacggggatcattctggttctggagatgaccgataactaccagctcattttgccaatgattattaccggtcttggcgcaacactattagcgcaatttaccggcgggaaaccgctatactcggcgattcttgcgcgcacgctggcaaaacaggaagctgagcaactggcgcgaagcaaggccgcatcagccagcgagaatacttgaacgaaataccagggtattagataatggcgattattattgggttagaatttgcccaattgccgatgtcgtttggagcaaaatatgagtgatgacgtagcactgccgctggagtttaccgacgcagcagccaacaaagttaaaagcctgatcgctgacgaagataacccgaatctgaaattacgcgtgtatatcaccggtggcggttgcagcggcttccagtatggtttcacctttgatgatcaggtgaacgaaggcgatatgaccatcgaaaaacagggcgttggcctggtggttgatccgatgagcctgcaatatctggtcggcggttccgttgactacaccgaaggactggaaggttctcgtttcatcgtgaccaacccgaacgcgaaaagcacctgcggttgcggttcttcctttagcatctaatctgttgttcatgtgccggataaactatccggcacatcttctctcttcaacgcccattctcatccagcgcaaacgtcggtagcttaagatgccaacgaatagccgccagccgaatcaatagcgtcacgaccatgcccatcatactggctgtttccagtggtacggaaaatgtgtaataagccgtagcgtggacaataccgccgataatacaggcagttgcgtagatttctgtacgtaaaatcatggggatctcgcgggccagtacatcacgaatgatcccgccgccaacgccagtaatgacgcccatgcaaaccgcgattaacggaccggcttccgcattaaaggctttattcacgccaatgccgacaaacaccgccagaccaacggcgtccagcaccggcaacatccattttggtaagcgtcttggctggcgcaccagcacgatggtcagcatgctggtgaccattgcaacgaccagatcggtgggatctttcacccaaaataccgggccgtgatccagcgccatgtcgcgaattgtcccgccgcctactgcggttaccacgcccagtaccagaacaccaaaagggtccatacgcaattttccggctaacaaaacgccggagatggcaaataccgctgtgccgactatatccagccaatagacgagcattgttcaatccccactgagcacctgaaaaggtcaggcgctaatctacctgtgaaagcgcattacagagctgttgtgcagcgaggataatacgtgggcttgcacgttcaaaccagtcactcgtgagaggaataacgggaattttgagctgttcaccccagtattgtttgattttaggaatttggtccggtccgcctgtaatgacaatcgcctgtggcgagcgtgctaacacctgttcgcggctaacttgcggccagggaacccggctgtctttaaagatgttttctccgccacaaacttcgagtacctggttctgaatcgactcttttccactggtaaatggcggattaatgccgaattgcagaaaaacacgttttttaggtttatcagcatattgcgctttcaattgcgcgtactgatccagcagggattgcgcggcttgttcggccttgtctggttgcggactccagggggccagttgacgtaacgcattggcaatttgttcaatgcttgtcgcatcgacccacatcacttttattcccagcgaagccagctggtcaacctgccgctcggcattacctccacgccaggcaatcaccagatcgggcttcagcgcgacaatgcgttccagattcatcccctgccaggtggaaacctgctcaatcttttgcgcttgtggaggatagtcggaatagctgctgaccccaaccggcgtgatcccggcagcaaaggcaagttcagtgttggcgggagaaagcgtgatgacgcgcggcgcggcgttgagccacagtggcgcaagaaaagacagggcgaccagcgccctgaacagtgacttagccatgtgcaagtttctgcaccagtgactcaaccatcaggctggactgtttagcggcaacagccaggaactcatcgaagctaagatgagactgttgatcggccacgtcggagatggcgcgtacgacaacaaacgggacgttgaaattgtggcagacatgggcgattgccgtcgcttccatctctacagcaatggcctgtgggaagttgtggcggattttcgccagaccaacagaaccgttgatgaaagcgtcgccgctaacaatcaggccacgtacagcgttaagattcagttcggcaatgcaggcctcagcggcagcgatcagtttatcgtcagctttaaagcctgccggacagcctggtaactgaccgtattcataaccaaatgccgtgacatccgcgtcgtgataacgtgcttcgtccgagacaacgatatcgcccactttcaacgttggtgccaggccaccggcagaaccggtgttaataatcacatctggcttgcagtgttccaacagcagagtggcacccagcgccgcagcgactttaccgatgcccgatttcagaagcgcaacctcggttccattcagttggccggtatagatttcgcaaccgccgagactgatagtttgacggttttcgattttgtcacgcagcagcgtaacttcttcttccattgcaccaatgatgccgattttcatagatttactcgcgataagcccgatttgaaggcatagtttaccatgcgcttacggggaagcgtatttctcacgcgggagaggacatggcacagattgatttccgaaaaaaaataaactggcatcgtcgttaccgttcaccgcagggcgttaaaaccgaacatgagatcctgcggatcttcgagagcgatcgcgggcgtatcatcaactctccggcaattcgtcgtctgcaacaaaagacccaggtttttccactggagcgcaatgccgccgtgcgcacgcgtcttacccactcgatggaagtccagcaggtggggcgctacatcgccaaagaaattttaagccgtctgaaagagcttaaattgctggaagcatacggcctggatgaactgaccggaccttttgaaagcattgttgagatgtcatgcctgatgcacgatatcggcaatccgccgtttggtcattttggcgaagcggcgataaatgactggtttcgccagcgtttatacccggaagatgccgaaagccagcctctgactgacgatcgctgcagcgtggcggcactacgtttacgggacggggaagaaccgcttaacgagctgcggcgcaagattcgtcaggacttatgtcattttgaggggaatgcacaaggcattcgtctggtgcatacattgatgaggatgaatctcacctgggcacaggttggcggtattttaaaatatacccgtccggcgtggtggcgtggcgaaacgcctgagacacatcactatttaatgaaaaagccgggttattatctttctgaagaagcctatattgcccggttgcgtaaagaacttaatttggcgctttacagtcgttttccattaacgtggattatggaagctgccgacgacatctcctattgtgtggcagaccttgaagatgcggtagagaaaagaatatttaccgttgagcagctttatcatcatttgcacgaggcgtggggtcagcatgagaaaggttcgctcttttcgctagtggttgaaaatgcctgggaaaaatcacgctcaaatagtttaagccgcagtacggaagatcagttttttatgtatttacgggtaaacaccctaaataaactggtaccatacgcggcacaacgatttattgataatctgcctgcgattttcgccggaacgtttaatcatgcattattggaagatgccagcgaatgcagcgatcttcttaagctatataaaaatgtcgctgtaaaacatgtgtttagccatccggatgtcgagcagcttgaattgcagggctatcgggtcattagcggattattagagatttatcgtcctttattaagcctgtcgttatcagactttactgaactggtagaaaaagaacgggtgaaacgtttccctattgaatcgcgcttattccacaaactctcgacgcgccatcggctggcctatgtcgaggctgtcagtaaattaccgtcagattctcctgagtttccgctatgggaatattattaccgttgccgcctgttgcaggattatatcagcggtatgaccgacctctatgcgtgggatgaataccgacgtctgatggccgtagaacaataaccaggcttttgtaaagacgaacaataaatttttaccttttgcagaaactttagttcggaacttcgcgctataaaacgaatctgaagaacacagcaattttgcgttatctgttaatcgagactgaaatacatgaaaaaaaccacattagcactgagtgcactggctctgagtttaggtttggcgttatctccgctctctgcaacggcggctgagacttcttcagcaacgacagcccagcagatgccaagccttgcaccgatgctcgaaaaggtgatgccttcagtggtcagcattaacgtagaaggtagcacaaccgttaatacaccgcgtatgccgcgtaatttccagcagttcttcggtgatgattctccgttctgccaggaaggttctccgttccagagctctccgttctgccaggggggccagggcggtaatggcggcggccagcaacaaaaattcatggcgctgggttccggcgtcatcattgatgccgataaaggctatgtcgtcaccaacaaccatgttgttgataacgcgacggtgattaaagtccagctgagcgatggtcgtaagttcgacgcgaagatggttggcaaagatccgcgctctgatatcgcgctgatccaaatccagaacccaaaaaacctgaccgcaattaagatggcggattctgatgcactgcgcgtgggtgattacaccgtagcgattggtaacccgtttggtctgggagagacggtaacttccgggattgtctctgcgctggggcgtagcggcctgaatgccgaaaactacgaaaacttcatccagaccgatgcagcgatcaaccgtggtaactccggtggtgcgctggttaacctgaacggcgaactgatcggtatcaacaccgcgatcctcgcaccggacggcggcaacatcggtatcggttttgctatcccgagcaacatggtgaaaaacctgacctcgcagatggtggaatacggccaggtgaaacgcggtgagctgggtattatggggactgagctgaattccgaactggcgaaagcgatgaaagttgacgcccagcgcggtgctttcgtaagccaggttctgcctaattcctccgctgcaaaagcgggcattaaagcgggtgatgtgatcacctcactgaacggtaagccaatcagcagctttgccgcactgcgtgctcaggtgggtactatgccggtgggcagcaaactgaccctgggcttgctgcgcgacggtaagcaggtcaacgtgaatctggaactgcagcagagcagccagaatcaggttgattccagctccatcttcaacggcattgaaggtgctgagatgagcaacaaaggcaaagatcagggcgtggtagtgaacaacgtgaaaacgggcactccggctgcgcagatcggcctgaagaaaggtgatgtgattattggcgcgaaccagcaggcagtgaaaaacatcgctgaactgcgtaaagttctcgacagcaaaccgtctgtgctggcactgaacattcagcgcggcgacagctccatctacctgttaatgcagtaatctccctcaaccccttcctgaaaacgggaaggggttctccttacaatctgtgaacttcaccacaactccatacatcttcatcatcctttaggcatttgcacaatgccgtacgttacgtacttccttatgctaagccgtgcataacggaggacttatggctggctggcatcttgataccaaaatggcgcaggatatcgtggcacgtaccatgcgcatcatcgataccaatatcaacgtaatggatgcccgtgggcgaattatcggcagcggcgatcgtgagcgtattggtgaattgcacgaaggtgcattgctggtactttcacagggacgagtcgtcgatatcgatgacgcggtggcacgtcatctgcacggtgtgcggcaggggattaatctaccgttacggctggaaggtgaaattgtcggcgtaattggcctgacaggtgaaccagagaatctgcgtaaatatggcgaactggtctgcatgacggctgaaatgatgctggaacagtcgcggttgatgcacctgttggcgcaggatagccgtttgcgggaagaactggtgatgaacctgattcaggctgaggagaatactcccgcacttactgaatgggcgcaacggctggggatcgatctcaatcaaccgcgagtagtggctattgttgaggtcgacagcggtcagcttggcgtggacagcgcaatggcggagttacaacaactgcaaaatgcgctgactacgcccgagcgtaataatctggtggcgattgtctcgctgaccgaaatggtggtgttgaaaccggcgttgaactcttttgggcgctgggatgcagaagatcatcgtaagcgagttgaacaactgattacccgcatgaaagagtatggccagctgcgttttcgcgtttcgctgggcaactattttaccggtcctggcagtattgcccgatcctatcgtacggcgaaaacgacgatggtggtgggtaaacagcggatgccagaaagtcgctgctatttttatcaggatctgatgttacctgtgttactcgacagtttgcgtggcgactggcaggccaatgaactggcgcgaccgctggcgcggctgaaagcgatggacaataatggcttgctgcgacgaacgctggcggcgtggtttcgccacaatgtgcaaccgctggctacgtcaaaggcgctgtttattcatcgtaatactctggagtatcggcttaatcgtatatcggaactgaccgggcttgatttgggtaattttgatgacaggttgctgctgtatgtggcgttgcagctggatgaagagcggtaggttatgcgttaaggtcgaggcggcgctggctcattcccctcagcccgaagggtagaggggaatgtccgagttaaccgtcagttcggcattatttacgcgttagtttttccagatcggcttcaatctcgctgatcttattggttacgactgactccaggtgacgtaagtcgtcgaggatcttacgcttaagatcaacttcgctgcggtcacgctggcagatttgatcaagctcatcaatgatataccgtagattcgggctgatttcctggacttctttataaccctgacccacaccatcagcgacgaccgttttacgctgacgcggatatttaaacttaacgctcttggcgaaaaactcgcctttgtctttctggaaatagattttcagaatatcgttgttggcttcctgccggaggctgtaacgatcaatttcttcaggattggtaatacccagacttttcagattgtcgtacatagcgttacctcaaaatgagtcagtaaattgtgcttattttagcatttggcctggcccgcccggctcgactgtgatcgcagaaagcctttttcttccagacttctatcatggcgtaaaaatcaaaaaattacctgctttattgtggcgatattccatgggatggattaacacatttatcttcgttttgcgaattacatgacagtccgaaacaagatgaaaaagtatttaaaaaaggggggaagaagaatgagtaggacgaattattctgagccagaaagcatacgggcagcatcatgctgcccgtatatgtactcttaatcgatggtacgcagcagttcgttaatgccgactttgccgcgagttttcgcgtcaactttcttaacgataaccgcacagtagaggctgtatttgccatctttcgacggcagattacctgaaacaaccacagaccccgccggaacgcgaccgtagtggatttcgccggtttcacggtcgtaaatacgggtgctctgaccaatgtatacgcccatagagatgacggaaccttcttcgacaatcaccccttcaaccacttcggagcgtgcgccaatgaagcagttatcttcaataatggtcgggttagcctgcagcggctccagcacgccgccgatgcccacgccaccggaaaggtggacgtttttaccaatctgcgcacaagaaccgacggtcgcccaggtatcaaccatcgtgccttcatcaacatatgcgccgatgttgacgtaagacggcatcagcacggtgttacgggcaataaatgcaccctgacgtaccgccgctggtggcacaacgcggaagccttctttctgaaaacgcgcttcgtcgtagtcggcgaatttcatcggcactttatcgaagtagcggctttctgccccttcgatcacctgattatcattaatacggaaagagagcagcaccgcttttttcaaccactgatgcgtcacccactgaccgtcaattttttccgctacacgcagtgcgccggaatccagcagggcgatcacctgatttaccgcttcgcgggttacggtgtctgcattggctggcgtgatctcggcacggcgttcaaaagcggtttcaataatgttctgtaactgctgcattgttaaactcttttcatatcagtaaacacatcaccctttatcgtttggattgagggcctctgtcaaccgctgatgcacttcctgctgcaactcgttattaagtgcacgccggtcagcggtggcaattatgaataaatcttctactcgctcgccaatggttgtaattcgggcaccatgaagcgaaattcccagatcggcaaaaattttcccgactctcgccagcagtcctggctggtcgagcgcgataagctcaaggaacgatttgcggtcggtatgggtcggcaaaaacgttacttcggtttcaacagtaaaatggcgtaatttggcgggttggcgacggggctgcggtggctgccagctactttgcgtcagtacttgctccagaccaaaccgaataacctcatgacgatctgcggacagcgggctgccatcgggttccagcacgataaaggtatccatcgccataccgtcgcgagtggtgaaaatttgtgcgtcgtgaacacttaaattgcggcggtctaattcggcacagacggcggcaaacagataggggcggtccgggctccagataaaaatctcggtgcctccacgcgtagcctgcgggctaagcaataccagcggtttgcttaaatcatgctgtaataaatggcgggcatgccaggccagttgatttgggctatggcggacaaaatagttagcacgacagcgtgaccaaatttggtgcagcgcctcttcgtcgatgttatccatgcgcagtagtgccagtgcctggagttggtgatggcgaacccgttcgcgcatatccggcgtgttttgcattccgcgtcgtagctgcttttcggtggcaaaatagagttcgcgcaacagactttgcttccagctattccacagcgtttcgttggtggcgcaaatgtcagccactgtcaggcataccagatagcgcagacgattttccgtttgaacttcttcggcaaactgcttgatgacttcagggtcctgaatatcgcggcgttgtgctgtcaccgacatcagcaagtgctggcgaaccagccaggcaaccagctgtgtttcgcgtgagttcagcccgtggagttctgcaaaatgcactacatcctgagcaccgagaatggagtggtcgccgccgcgtcctttggcgatatcgtgaaacagcgcggcgatgaaaatcagctcagttgacggcaggcgcggccagacgtccacacacaacggatggcgctggcgcgtttcttcactggcaaaactctccagtttcagcatcacgcggatagtatgttcatccaccgtgtaggcgtggaacagatcaaactgcatctgcccgacgatatgcgaccattgcggcatatacgcgccgagcacgctatggcgatgcattggcaatagcccgcgccgcaccgctccggggtgacgcagaatgctcaaaaacagttttcgtgcttccggaatattacacagcggttgttgcagatggcgacgggcatggcgtaactggcgcagcgtggtggagtaaatgccggtgatcgcactgttgcgcaccatggtgtagaacatacgcaagatggcttccggctggcgcataaatagtgtttcatcacgcaggtcgattagcgtaccgcgtagctgaaactcatcgtcgattggacgtggtttttcgtcggcgggaagggcgaggatggcttcatcgaacagttgcagcagcatctggttgagttcactgacgcggcgtgtaacgcggaagtaatccttcatcatccgctcgaccggttcgttgccttcaccactgtaattcagacgctgagcgacgctaagttggcgatcgaataacagacgattatcgtaacggctgacgaccagatgcagggcaaagcgaatacgccacagtatatgcagacattcgtttaattccgcccgctccgctgaggttaagaagccaaacccgaccatttcatccagcgatgttgcgccaaaatgacggcgggccacccattgcagagtgtgaatatcgcgcaagccgccagggctacttttgatgtctggttcaaggttgtagctggtgccatggtaacgctgatggcgctggttctgttcttcaactttcgccgcgtagaacttgtcggaaggccagaatccttcgctaaaaatatgtttttgcagttcgaggaagagcgcaacatcgccaattaataagcgggattcgattaaattggtggcgacggttaaatccgataacccttccagcatgcactcttcaagcgtgcgcacactatgaccgacttccagctttacatcccagagcagcgttaacagctcgcccactttttgcgcctgatcgtccgggagctttttacggcttaaaatcagtaaatcgatgtcagaaagtggatgcagctcgccacgaccgtagccaccgacggcgaccaatgccaggtcggcaatctggctgaatcccgcttcaatccataatcgttgcaggagctggtcgataaactcggtgcgcgcctcaatcaactgttctgcagagatcccattgtcaaaggcatcacccagccaacgctggaaagtatcgatatgggcttttatcccaccgacggttaattcatcacggggccagacgcatggattttgcggttgaccgggcagggtggggagagcggtgtttgcgtactgttctggaagggtattcattgtgcgccacccataagattaaattatcgcattaaaaaagccggcattcgccggcttcatcttattcgtcgtgcgagattatcgccgggatggtgtcatccttgcgtagcgtcaaaatttcgcagccgttatcagtcaccacaatagtatgctcatattgtgcagacaagctgcgatctttggtttttaccgtccagccatctttcatggtgcggatctcttttttacccgcgttgaccattggctcaatggtgaacgtcatccccggtttcagcacgacgttggtttcacgggagtcatagtgcagcacctgcggttcttcatggaagccgcgaccaataccgtgtccacaatattcacgaacgacggagaagccttctgcttcgacaaacttctgaatcgccgcaccgatttcgcgcaggttaatgcctggtttgaccatgcgcagcgccaggtacaggctttcttgcgtgatgcggcacagacgttcgcccatgatggtcggcttaccgacgataaacattttcgaggtatcgccgtggaaaccatctttgattacggtgacatcaatgttaacgatatcgccatctttcagcagcttagcatcgtccgggataccgtggcacaccacttcattaatagagatgcaaacggatttcggatagccgtgatagccgaggcaggcagaaaccgcgtgttgttcattaacaatgtaatcattacagatgcgatccagctcgccggtgctgacgcccggtttaacatacggttcgatcatctccagcacttcggcagccagtcggccagcgacgcgcattttttcgatatcttctggggtcttgattgagatagccattaattctgtccatcagcgtcggtgataccgacaatatatatgtaagtgccgtcaatggtatcacacccgggcaaattgagaatcattctgaatttcgccaaacgtgccactgaaggttttctataatagaaaattcgacatctgatgctgtacacagcgccaacaattattggtgtccatgacgtatttgtggtataaagcgcgccggacttccgatccatttcgtatacacagactggacggaagcgacaatctcactttgtgtaacaacacacacgtatcggcacatattccggggtgccctttggggtcggtaatatgggatacgtggaggcataaccccaacttttatatagaggttttaatcatggcaactgtttccatgcgcgacatgctcaaggctggtgttcacttcggtcaccagacccgttactggaacccgaaaatgaagccgttcatcttcggtgcgcgtaacaaagttcacatcatcaaccttgagaaaactgtaccgatgttcaacgaagctctggctgaactgaacaagattgcttctcgcaaaggtaaaatccttttcgttggtactaaacgcgctgcaagcgaagcggtgaaagacgctgctctgagctgcgaccagttcttcgtgaaccatcgctggctgggcggtatgctgactaactggaaaaccgttcgtcagtccatcaaacgtctgaaagacctggaaactcagtctcaggacggtactttcgaaaagctgaccaagaaagaagcgctgatgcgcactcgtgagctggagaaactggaaaacagcctgggcggtatcaaagacatgggcggtctgccggacgctctgtttgtaatcgatgctgaccacgaacacattgctatcaaagaagcaaacaacctgggtattccggtatttgctatcgttgataccaactctgatccggacggtgttgacttcgttatcccgggtaacgacgacgcaatccgtgctgtgaccctgtacctgggcgctgttgctgcaaccgtacgtgaaggccgttctcaggatctggcttcccaggcggaagaaagcttcgtagaagctgagtaataaggcttgataactcccccaaaatagttcgagttgcagaaaggcggcaagctcgagaattcccgggagcttacatcagtaagtgaccgggatgagcgagcgaagacaacgcatctgcggcgcgaaatatgaagggggagagcccttatagaccaggtagtacacgtttggttagggggcctgcatatggccccctttttcacttttatatctgtgcggtttaatgccgggcagatcacatctccgaggattttagaatggctgaaattaccgcatccctggtaaaagagctgcgtgagcgtactggcgcaggcatgatggattgcaaaaaagcactgactgaagctaacggcgacatcgagctggcaatcgaaaacatgcgtaagtccggtgctattaaagcagcgaaaaaagcaggcaacgttgctgctgacggcgtgatcaaaaccaaaatcgacggcaactacggcatcattctggaagttaactgccagactgacttcgttgcaaaagacgctggtttccaggcgttcgcagacaaagttctggacgcagctgttgctggcaaaatcactgacgttgaagttctgaaagcacagttcgaagaagaacgtgttgcgctggtagcgaaaattggtgagaacatcaacattcgccgcgttgctgcgctggaaggcgacgttctgggttcttatcagcacggtgcgcgtatcggcgttctggttgctgctaaaggcgctgacgaagagctggttaaacacatcgctatgcacgttgctgcaagcaagccagaattcatcaaaccagaagacgtatccgctgaagtggtagaaaaagaataccaggtacagctggatatcgcgatgcagtctggtaagccgaaagaaatcgcagagaaaatggttgaaggccgcatgaagaaattcaccggcgaagtttctctgaccggtcagccgttcgttatggaaccaagcaaaactgttggtcagctgctgaaagagcataacgctgaagtgactggcttcatccgcttcgaagtgggtgaaggcatcgagaaagttgagactgactttgcagcagaagttgctgcgatgtccaagcagtcttaattatcgaaaaggagccgcctgagggcggcttctttttgtgcccatcttgtaaattcagctaacccttgtggggctgcgctgaaaagcgacgtacaatgtcgctagtattaattcatttcaatcgttggcagtctcaggaaagaaacatggctaccaatgcaaaacccgtctataaacgcattctgcttaagttgagtggcgaagctctgcagggcactgaaggcttcggtattgatgcaagcatactggatcgtatggctcaggaaatcaaagaactggttgaactgggtattcaggttggtgtggtgattggtgggggtaacctgttccgtggcgctggtctggcgaaagcgggtatgaaccgcgttgtgggcgaccacatggggatgctggcgaccgtaatgaacggcctggcaatgcgtgatgcactgcaccgcgcctatgtgaacgctcgtctgatgtccgctattccattgaatggcgtgtgcgacagctacagctgggcagaagctatcagcctgttgcgcaacaaccgtgtggtgatcctctccgccggtacaggtaacccgttctttaccaccgactcagcagcttgcctgcgtggtatcgaaattgaagccgatgtggtgctgaaagcaaccaaagttgacggcgtgtttactgctgatccggcgaaagatccaactgcaaccatgtacgagcaactgacttacagcgaagtgctggaaaaagagctgaaagtcatggacctggcggccttcacgctggctcgtgaccataaattaccgattcgtgttttcaacatgaacaaaccgggtgcgctgcgccgtgtggtaatgggtgaaaaagaagggactttaatcacggaataattcccgtgatggataaataagggtaagattccgcataagtatcgcgggggcgtaagtctggttataaggcgttattgttgcaggcagtttggtcacggccagcgcgcagcaaccggtgcgtacacaagtacgtgaggatggcgagcactacccggggccaaaatggcaaataaaatagcctaataatccagacgattacccgtaatatgtttaatcagggctatacttagcacacttccactgtgtgtgactgtctggtctgactgagacaagttttcaaggattcgtaacgtgattagcgatatcagaaaagatgctgaagtacgcatggacaaatgcgtagaagcgttcaaaacccaaatcagcaaaatacgcacgggtcgtgcttctcccagcctgctggatggcattgtcgtggaatattacggcacgccgacgccgctgcgtcagctggcaagcgtaacggtagaagattcccgtactctgaaaatcaacgtgtttgatcgttcaatgtctccggccgttgaaaaagcgattatggcgtccgatcttggcctgaacccgaactctgcgggtagcgacatccgtgttccgctgccgccgctgacggaagaacgtcgtaaagatctgaccaaaatcgttcgtggtgaagcagaacaagcgcgtgttgcagtacgtaacgtgcgtcgtgacgcgaacgacaaagtgaaagcactgttgaaagataaagagatcagcgaagacgacgatcgccgttctcaggacgatgtacagaaactgactgatgctgcaatcaagaaaattgaagcggcgctggcagacaaagaagcagaactgatgcagttctgatttcttgaacgacaaaaacgccgctcagtagatccttgcggatcggctggcggcgttttgctttttattctgtctcaactctggatgtttcatgaagcaactcaccattctgggctcgaccggctcgattggttgcagcacgctggacgtggtgcgccataatcccgaacacttccgcgtagttgcgctggtggcaggcaaaaatgtcactcgcatggtagaacagtgcctggaattctctccccgctatgccgtaatggacgatgaagcgagtgcgaaacttcttaaaacgatgctacagcaacagggtagccgcaccgaagtcttaagtgggcaacaagccgcttgcgatatggcagcgcttgaggatgttgatcaggtgatggcagccattgttggcgctgctgggctgttacctacgcttgctgcgatccgcgcgggtaaaaccattttgctggccaataaagaatcactggttacctgcggacgtctgtttatggacgccgtaaagcagagcaaagcgcaattgttaccggtcgatagcgaacataacgccatttttcagagtttaccgcaacctatccagcataatctgggatacgctgaccttgagcaaaatggcgtggtgtccattttacttaccgggtctggtggccctttccgtgagacgccattgcgcgatttggcaacaatgacgccggatcaagcctgccgtcatccgaactggtcgatggggcgtaaaatttctgtcgattcggctaccatgatgaacaaaggtctggaatacattgaagcgcgttggctgtttaacgccagcgccagccagatggaagtgctgattcacccgcagtcagtgattcactcaatggtgcgctatcaggacggcagtgttctggcgcagctgggggaaccggatatgcgtacgccaattgcccacaccatggcatggccgaatcgcgtgaactctggcgtgaagccgctcgatttttgcaaactaagtgcgttgacatttgccgcaccggattatgatcgttatccatgcctgaaactggcgatggaggcgttcgaacaaggtcaggcagcgacgacagcattgaatgccgcaaacgaaatcaccgttgctgcttttcttgcgcaacaaatccgctttacggatatcgctgcgttgaatttatccgtactggaaaaatggatatgcgcgaaccacaatgtgtggacgatgtgttatctgttgatgcgaacgcgcgtgaagtcgccagaaaagaggtgatgcgtctcgcaagctgaggataatccggctacagagagtcgcgctatttgttagcgtagggcttcagtgatatagtctgcgccatctgatcgtaagtagttggctttataaggtcaggtatgccgtggttttacacggcttttttttgtataggcttcagtattcctgagtaccgtaaaccctgtcagggaataaaaaacgcgtgatgttgtctgctactcaaccacttagcgaaaaattgccagcgcatggctgccgtcatgttgcgatcattatggacggcaatggtcgctgggcaaaaaagcaagggaagattcgtgcctttgggcataaagccggggcaaaatccgtccgccgggctgtctcttttgcggccaacaacggtattgaggcgttaacgctgtatgcctttagtagtgaaaactggaaccgaccagcgcaggaagtcagtgcgttaatggaactgtttgtgtgggcgctcgatagcgaagtaaaaagtctgcaccgacataacgtgcgtctgcgtattattggcgataccagtcgctttaactcgcgtttgcaagaacgtattcgtaaatctgaagcgctaacagccgggaataccggtctgacgctgaatattgcggcgaactacggtggacgttgggatatagtccagggagtcaggcaactggctgaaaaggtgcagcaaggaaacctgcaaccagatcagatagatgaagagatgctaaaccagcatgtctgtatgcatgaactggcccctgtagatttagtaattaggactgggggggagcatcgcattagtaactttttgctttggcaaattgcctatgccgaactttactttacagatgttctctggcccgatttcgatgaacaagactttgaaggggcgttaaatgcctttgctaatcgagagcgtcgtttcggcggcaccgagcccggtgatgaaacagcctgatgggggtcgcttttgctgaagtatcgcctgatatctgcttttgtgttaatacccgtcgtcatcgcggcgttgtttctgttgccgccggtggggttcgccatcgtaacgctggtggtctgcatgctggcagcgtgggaatggggacagcttagcggttttaccactcgttcgcagcgagtatggttggcggtgttatgcgggttattgttggcgctgatgctttttctgttgccggaatatcaccgaaatattcatcaaccgctggttgaaatctcactttgggcttcgctgggttggtggattgtcgcgctattgctggtgctgttttacccaggttccgcagcaatctggcgtaactctaaaacattgcgccttatttttggcgtgctaaccattgttcccttcttctggggcatgctggcgttacgggcctggcactacgacgagaatcattacagtggcgcaatatggctgctctatgtcatgatcctggtatggggcgctgactctggcgcatatatgtttggcaaattgtttggtaaacataagctggcaccgaaggtttctccgggtaaaacctggcaaggctttataggtggactagcgaccgcagcggtaatctcatggggttatggcatgtgggcgaatctcgacgtcgctcccgtcaccttactcatttgctctattgtcgcagcgttagcctcagtgctcggcgatctgaccgagagtatgtttaagcgtgaagcaggaattaaggacagcggtcatttaattccaggacacggtggtattttagatcgtattgatagcctgacggctgcggtaccggtctttgcttgcttgttgttactggtattcaggacgctttaacggaaggtaatatgctgagttttctctgggatttggcttcgttcatcgttgcactgggtgtacttatcaccgtgcatgaatttggtcatttctgggttgcccggcgttgtagtgttcgcgttgagcgtttctcaatagggtttggtaaggcgctctggcggcgaactgataagctcggcaccgaatatgttatcgccctgatcccgctgggcggttatgtcaaaatgctggatgagcgcgcagaaccggtcgttccggaactccgccaccatgccttcaataataaatctgttggccaacgagcggcgattattgccgcaggtccggttgcaaacttcatttttgctatcttagcctactggctggtttttattattggtgtgcctggcgtacgtccggtggttggtgaaatagcagccaattcgatagctgcggaagcacaaattgcaccaggtacggaactaaaagccgtagatggtatcgaaacgcctgattgggatgccgtgcgtttgcagttggtcgataaaattggcgatgaaagcaccaccattacagtagcgccatttggcagcgaccaacggcgggatgtaaagctcgatttacgtcactgggcgtttgagcctgataaagaagatccggtatcttcgctggggattcgtcctcgtgggccgcaaattgaacctgtactggaaaatgtgcagccaaactcggcggcaagcaaggcaggtttgcaagcaggcgacaggatcgttaaagtcgatggtcagcccttaacgcagtgggtgacctttgtgatgcttgtccgggataacccgggtaaatccttagcgttagaaatcgaaaggcaggggagtcccttgtctttgacattaatcccggagagtaaaccgggtaatggtaaagcgattggttttgtcggtattgagccgaaagtcattcctttgccagatgagtataaagttgtacgccagtatgggccgttcaacgccatcgtcgaagccacggacaaaacgtggcagctgatgaagctgacggtcagtatgctgggaaaattgatcaccggtgatgtgaaactgaacaacctcagtgggccgatctctatcgccaagggggctgggatgacagcggaactcggggtagtttattacctgccgtttcttgcgcttattagcgtgaacttagggataattaacctgtttccgttgcccgtactagacgggggcatctgctgttccttgcgatcgaaaagatcaagggcggaccggtatccgagcgggttcaagacttttgttatcgcattggctcgattctgctggtgctgttaatggggcttgcacttttcaatgatttctctcggttatgagagttagttaggaagaacgcataataacgatggcgatgaaaaagttgctcatagcgtcgctgctgtttagcagcgccaccgtatacggtgctgaagggttcgtagtgaaagatattcatttcgaaggccttcagcgtgtcgccgttggtgcggccctcctcagtatgccggtgcgcacaggcgacacggttaatgatgaagatatcagtaataccattcgcgctctgtttgctaccggcaactttgaggatgttcgcgtccttcgtgatggtgatacccttctggttcaggtaaaagaacgtccgaccattgccagcattactttctccggtaacaaatcggtgaaagatgacatgctgaagcaaaacctcgaggcttctggtgtgcgtgtgggcgaatccctcgatcgcaccaccattgccgatatcgagaaaggtctggaagacttctactacagcgtcggtaaatatagcgccagcgtaaaagctgtcgtgaccccgctgccgcgcaaccgtgttgacctaaaactggtgttccaggaaggtgtgtcagctgaaatccagcaaattaacattgttggtaaccatgctttcaccaccgacgaactgatctctcatttccaactgcgtgacgaagtgccgtggtggaacgtggtaggcgatcgtaaataccagaaacagaaactggcgggcgaccttgaaaccctgcgcagctactatctggatcgcggttatgcccgtttcaacatcgactctacccaggtcagtctgacgccagataaaaaaggtatttacgtcacggtgaacattaccgaaggcgatcagtacaagctttctggcgttgaagtgagcggcaaccttgccgggcactccgctgaaattgagcagctgactaagatcgagccgggcgagctgtataacggcaccaaagtgaccaagatggaagatgacatcaaaaagcttctcggtcgctatggttatgcctatccgcgcgtacagtcgatgcctgaaattaacgatgccgacaaaaccgttaaattacgcgtgaacgttgatgcgggtaaccgtttctacgtgcgtaagatccgttttgaaggtaacgatacctcgaaagatgccgtcctgcgtcgcgaaatgcgtcagatggaaggtgcatggctgggaagcgatctggtcgatcagggtaaggagcgtctgaatcgtctgggcttctttgaaactgtcgataccgatacccaacgtgttccgggtagcccggaccaggtagatgtcgtctacaaggtaaaagagcgcaacaccggtagcttcaactttggtattggttacggtactgaaagtggcgtgagcttccaggctggtgtgcagcaggataactggttaggtacaggttatgctgttggtatcaacgggaccaaaaacgattaccagacctatgctgaactgtcggtaaccaacccgtacttcactgtagatggtgtaagcctcggtggtcgtctcttctataatgacttccaggcagatgacgccgacctgtccgactataccaacaagagttatggtacagacgtgacgttgggcttcccgatcaacgaatataactcgctgcgtgcaggtctgggttatgtacataactccctgtccaacatgcagcctcaggttgcgatgtggcgttatctgtactctatgggtgaacatccgagcacctctgatcaggataatagcttcaaaacggacgacttcacgttcaactatggttggacctataacaagcttgaccgtggttacttcccgacagatggttcacgtgtcaaccttaccggtaaagtgaccattcctggatcggataacgaatactacaaagtgacgttagacacggcgacttatgtgccgatcgatgacgatcacaaatgggttgttctggggcgtacccgctggggttatggtgatggtttaggcggcaaagagatgccgttctacgagaacttctatgccggtggttccagcaccgtgcgtggcttccagtccaatacaattggtccgaaagcagtttacttcccgcatcaggccagtaattatgatccggactatgattacgaatgtgcgactcaggacggcgcgaaagacctgtgtaaatcggatgatgctgtaggcggtaacgccatggcggttgccagcctcgagttcatcaccccgacgccgtttattagcgataagtatgctaactcggttcgtacttccttcttctgggatatgggtaccgtttgggatacaaactgggattccagccaatattctggatatccggactatagtgatccaagcaatatccgtatgtctgcgggtatcgcattacaatggatgtccccattggggccgttggtgttctcctacgcccagccgttcaaaaagtacgatggagacaaggcagaacagttccagtttaacatcggtaaaacctggtaagtgttctccacaaaggaatgtagtggtagtgtagcgatgactttaggcgatcaatataagatcgccgggccacgcaaagaactgcaccctccggtgcaaatgggatggtaaggagtttattgtgaaaaagtggttattagctgcaggtctcggtttagcactggcaacttctgctcaggcggctgacaaaattgcaatcgtcaacatgggcagcctgttccagcaggtagcgcagaaaaccggtgtttctaacacgctggaaaatgagttcaaaggccgtgccagcgaactgcagcgtatggaaaccgatctgcaggctaaaatgaaaaagctgcagtccatgaaagcgggcagcgatcgcactaagctggaaaaagacgtgatggctcagcgccagacttttgctcagaaagcgcaggcttttgagcaggatcgcgcacgtcgttccaacgaagaacgcggcaaactggttactcgtatccagactgctgtgaaatccgttgccaacagccaggatatcgatctggttgttgatgcaaacgccgttgcttacaacagcagcgatgtaaaagacatcactgccgacgtactgaaacaggttaaataagtaatgccttcaattcgactggctgatttagcgcagcagttggatgcagaactacacggtgatggcgatatcgtcatcaccggcgttgcgtccatgcaatctgcacaaacaggtcacattacgttcatggttaacccaaaataccgtgagcatttaggcttgtgccaggcgtccgcggttgtcatgacccaggacgatcttcctttcgcgaaaagtgccgcgctggtagtgaagaatccctacctgacttacgcgcgcatggcgcaaattttagataccacgccgcagcccgcgcagaacattgcacccagtgcggtgatcgacgcgacggcgaagctgggtaacaacgtatcgattggcgctaacgcggtgattgagtccggcgttgaactgggcgataacgtgattatcggtgccggttgcttcgtaggtaaaaacagcaaaatcggtgcaggttcgcgtctctgggcgaacgtaaccatttaccatgagatccagatcggtcagaattgcctgatccagtccggaacagtggtaggcgcagacggctttggttatgccaacgatcgtggtaactgggtgaagatcccacagattggtcgcgtaattattggcgatcgcgtggagatcggtgcctgcacaaccatcgatcgcggcgcgctggatgacactattattggcaatggcgtgatcattgataaccagtgccagattgcacataacgtcgtgattggcgacaatacggcggttgccggtggcgtcattatggcgggcagcctgaaaattggtcgttactgcatgatcggcggagccagcgtaatcaacgggcatatggaaatatgcgacaaagtgacggttacgggcatgggtatggtgatgcgtcccatcactgaaccaggcgtctattcctcaggcattccgctgcaacccaacaaagtctggcgcaaaaccgctgcactggtgatgaacattgatgacatgagcaagcgtctgaaatcgcttgagcgcaaggttaatcaacaagactaacgttccatcttttgttcgccaaactttacggcctgtctcattcttacgattgcggcaggccgtgttattattgtcgtttcttatattttgacaggaagagtatcttgactactaacactcatactctgcagattgaagagattttagaacttctgccgcaccgtttcccgttcttactggtggatcgcgtgctggattttgaagaaggtcgttttctgcgcgcagtaaaaaatgtctctgtcaatgagccattcttccagggccatttccctggaaaaccgattttcccgggtgtgctgattctggaagcaatggcacaggcaacaggtattctggcgtttaaaagcgtaggaaaactggaaccgggtgaactgtactacttcgctggtattgacgaagcgcgcttcaagcgcccggtcgtgcctggcgatcaaatgatcatggaagtcactttcgaaaaaacgcgccgcggcctgacccgttttaaaggggttgctctggtcgatggtaaagtagtttgcgaagcaacgatgatgtgtgctcgtagccgggaggcctgataagtgattgataaatccgcctttgtgcatccaaccgccattgtggaagagggcgcgtcaattggcgcgaacgcacacattggtcctttttgtatcgttggaccccatgtcgaaattggtgagggtaccgtactgaaatctcacgttgtcgtgaatggtcatactaaaattggccgcgataatgagatttatcagttcgcctccatcggcgaagttaaccaggatctgaaatatgctggcgaaccgacccgtgtggaaatcggcgatcgtaaccgcattcgcgaaagcgtcaccattcatcgtggcacagtccagggcggtggattgacgaaggtgggcagcgacaacttactgatgatcaacgcgcacattgcgcacgattgtacggtaggtaaccgctgtattctcgccaacaacgcaacgctggcgggtcacgtatcggttgacgacttcgcgatcatcggcggcatgaccgcagtccatcagttctgcatcattggtgcgcacgtgatggttggcggctgctccggtgtggcgcaggacgtccctccttatgtcattgcgcagggtaaccacgcaacgccgttcggtgtcaatatcgaagggctgaagcgccgcggattcagccgtgaggcgattaccgctatccgcaatgcgtataagctgatttatcgtagcggtaaaacgctcgatgaagtgaaaccggaaattgctgaactggcggaaacatatccggaagtgaaagcctttaccgatttctttgcacgctcaacgcgcggtctgattcgttaatgactgaacagcgtccattaacgattgccctggtcgccggagaaacctccggcgatatcctgggggccggtttaatccgcgctctgaaagaacgtgtgcccaacgcccgctttgttggtgttgccgggccacgaatgcaggctgaaggctgcgaagcctggtacgaaatggaagaactggcggtaatgggcattgttgaagtgctcggtcgtctgcgtcgcttactgcatattcgtgccgatctgacaaagcgttttggcgaactgaagccagatgtttttgttggtattgatgcgcccgacttcaatattactcttgaaggtaacctcaaaaagcagggtatcaaaaccattcattacgtcagtccatccgtctgggcgtggcgacagaaacgcgttttcaaaataggcagagccaccgatctggtgctcgcatttctgcctttcgaaaaagcgttttatgacaaatacaatgtaccgtgccgctttatcggtcataccatggctgatgccatgccgttagatccagataaaaatgccgcccgtgatgtgctggggatccctcacgatgcccactgcctggcgttgctaccggggagccgtggcgcagaagttgaaatgcttagtgccgatttcctgaaaacggcccagcttttgcgccagacatatccggatctcgaaatcgtggtgccactggtgaatgccaaacgccgcgagcagtttgaacgcatcaaagctgaagtcgcgccagacctttcagttcatttgctggatgggatgggccgtgaggcgatggtcgccagcgatgcggcgctactggcgtcgggtacggcagccctggagtgtatgctggcgaaatgcccgatggtggtgggatatcgcatgaagccttttaccttctggttggcgaagcggctggtgaaaactgattatgtctcgctgccaaatctgctggcgggcagagagttagtcaaagaattattgcaggaagagtgtgagccgcaaaaactggctgcggcgctgttaccgctgttggcgaacgggaaaaccagccacgcgatgcacgataccttccgtgaactgcatcagcagatccgctgcaatgccgatgagcaggcggcacaagccgttctggagttagcacaatgatcgaatttgtttatccgcacacgcagctggttgcgggtgtggatgaagtcggacgcgggccgttagttggcgcggtcgtcaccgctgcggtgatccttgacccggcgcgcccgattgccgggctgaatgattccaaaaagctgagcgaaaaacgccgtctggcgctctatgaagagatcaaagagaaagcgttgagctggagtctgggccgcgcggaaccccacgaaatcgacgagctgaacattcttcatgcgaccatgctggcgatgcagcgtgccgtcgctgggctgcatattgcgccggaatatgtgttgattgatggtaaccgctgcccgaaattaccgatgcctgcgatggctgtggtgaaaggcgatagccgcgtaccggaaatcagtgccgcgtctatcctggcgaaagtgacgcgtgacgccgaaatggcggcgctggatattgttttcccgcaatatggttttgcccaacacaaagggtacccaaccgcttttcatctggaaaaactggctgaacacggcgcgaccgaacaccatcggcgcagctttgggcctgtcaaacgcgcactgggacttgcgtcctgattcttgtgtcgagattaagtaaaccggaatctgaagatgtctgaaccacgtttcgtacacctgcgggtgcacagcgactactcgatgatcgatggcctggccaaaaccgcaccgctggtaaaaaaggcggcggcgttgggtatgccagcactggcgatcaccgatttcaccaacctttgcggtctggtgaagttctacggagcgggacatggcgcagggattaagcctatcgtcggggcagattttaacgtccagtgcgacctgctgggtgatgagttaacccacctgacggtactggcggcgaacaataccggctatcagaatctgacgttgctgatctcaaaagcgtatcagcgcgggtacggtgccgccgggccgatcatcgatcgcgactggcttatcgaattaaacgaagggttgatccttctttccggcggacgcatgggcgacgtcggacgcagtcttttgcgtggtaacagcgcgctggtagatgagtgtgtcgcgttttatgaagaacacttcccggatcgctattttctcgagctgatccgcaccggcaggccggacgaagaaagctatctgcacgcggcggtggaactggcggaagcgcgcggtttgcccgtcgtggcgaccaacgacgtgcgctttatcgacagcagcgactttgacgcacacgaaatccgcgtcgcgatccacgacggctttaccctcgacgatcctaaacgcccgcgtaactattcgccgcagcaatatatgcgtagcgaagaggagatgtgtgagctgtttgccgacatccccgaagcccttgccaacaccgttgagatcgccaaacgctgtaacgtaaccgtgcgtcttggtgaatacttcctgccgcagttcccgaccggggacatgagcaccgaagattatctggtcaagcgtgcaaaagagggcctggaagagcgtctggcctttttattccctgatgaggaagaacgtcttaagcgccgcccggaatatgacgaacgtctggagactgaacttcaggttatcaaccagatgggcttcccgggctacttcctcatcgttatggaatttatccagtggtcgaaagataacggcgtaccggtagggccaggccgtggctccggtgcgggttcactggtggcctacgcgctgaaaatcaccgacctcgatccgctggaatttgacctgctgttcgaacgtttccttaacccggaacgtgtctccatgcctgacttcgacgttgacttctgtatggagaaacgcgatcaggttatcgaacacgtggcggacatgtacggtcgtgatgcggtatcgcagatcatcaccttcggtacaatggcggcgaaagcggtgatccgcgacgtaggccgcgtgctggggcatccgtacggctttgtcgatcgtatctcgaaactgatcccgcccgatccggggatgacgctggcgaaagcgtttgaagccgagccgcagctgccggaaatctacgaagcggatgaagaagttaaggcgctgatcgacatggcgcgcaaactggaaggggtcacccgtaacgccggtaagcacgccggtggggtggttatcgcgccgaccaaaattaccgattttgcgccgctttactgcgatgaagagggcaaacatccggtcacccagtttgataaaagcgacgttgaatacgccggactggtgaagttcgacttccttggtttgcgtacgctcaccatcatcaactgggcgctggagatgatcaacaagcggcgggcgaagaatggcgagccgccgctggatatcgccgcgatcccgctggatgacaagaaaagcttcgacatgctgcaacgctcggaaaccacggcggtattccagcttgaatcgcgcggcatgaaggacctgatcaagcgtctgcaacctgactgcttcgaagatatgatcgcactggtggcgctgttccgcccaggtccgttgcaatcagggatggtggataactttatcgaccgtaaacatggtcgcgaagaaatctcctatccggacgtacagtggcagcatgaaagcctgaaaccggtactggagccaacctacggcatcatcctgtatcaggaacaggtcatgcagattgcgcaggtgctttctggttataccctcggtggcgcggatatgctgcgtcgtgcgatgggtaagaaaaagccggaagagatggctaagcagcgttctgtatttgctgaaggtgcagaaaagaacggaatcaacgccgaactggcgatgaaaatcttcgacctggtggagaaattcgcgggttacggatttaacaaatcgcactctgcggcctatgctttggtgtcatatcaaacgttatggctgaaagcgcactatccggcggagtttatggcggcggtaatgaccgccgatatggacaacaccgagaaggtggtgggcctggtggatgagtgctggcggatggggctaaaaatcctgccaccagatataaactccggtctttaccatttccacgtcaacgacgacggcgaaatcgtgtatggtattggcgccatcaaaggggtaggtgaaggtccgattgaggccatcatcgaagcccgtaataaaggcggctacttccgcgaactgtttgatctctgcgcccgtaccgacaccaaaaagttaaaccggcgggtgctggaaaaactgatcatgtccggggcgtttgaccgtcttgggccacaccgcgcggcgctgatgaactcgctgggtgatgcgttaaaagcggcagatcaacacgcgaaagcggaagctatcggtcaggccgatatgttcggcgtgctggccgaagagccggaacaaattgaacaatcctacgccagctgccaaccgtggccggagcaggtggtattagatggggaacgtgaaacgttaggcctgtacctgaccggacaccctatcaaccagtatttaaaagagattgagcgttatgtcggaggcgtaaggctgaaagacatgcacccgacagaacgtggtaaagtcatcacggctgcggggctcgttgttgccgcgcgggttatggtcaccaagcgcggcaatcgtatcggtatctgcacgctggatgaccgttccgggcggctggaagtgatgttgtttactgacgccctggataaataccagcaattgctggaaaaagaccgcatacttatcgtcagcggacaggtcagctttgatgacttcagcggtgggcttaaaatgaccgctcgcgaagtgatggatattgacgaagcccgggaaaaatatgctcgcgggcttgctatctcgctgacggacaggcaaattgatgaccagcttttaaaccgactccgtcagtctctggaaccccaccgctctgggacaattccagtacatctctactatcagagggcggatgcacgcgcgcggttgcgttttggcgcgacgtggcgtgtctctccgagcgatcgtttattaaacgatctccgtggcctcattggttcggagcaggtggaactggagtttgactaatacaggaatactatgagtctgaatttccttgattttgaacagccgattgcagagctggaagcgaaaatcgattctctgactgcggttagccgtcaggatgagaaactggatattaacatcgatgaagaagtgcatcgtctgcgtgaaaaaagcgtagaactgacgcgtaaaatcttcgccgatcttggtgcatggcagattgcgcaactggcacgccatccacagcgtccttataccctggattacgttcgcctggcatttgatgaatttgacgaactggctggcgaccgcgcgtatgcagacgataaagctatcgtcggtggtatcgcccgtctcgatggtcgtccggtgatgatcattggtcatcaaaaaggtcgtgaaaccaaagaaaaaattcgccgtaactttggtatgccagcgccagaaggttaccgcaaagcactgcgtctgatgcaaatggctgaacgctttaagatgccaatcatcacctttatcgacaccccgggggcttatccgggcgtgggcgcagaagaacgtggtcagtctgaagccattgcacgcaacctgcgtgaaatgtctcgcctcggcgtaccggtagtttgtacggttatcggtgaaggtggttctggcggtgcgctggcgattggcgtgggcgataaagtgaatatgctgcaatacagcacctattccgttatctcgccggaaggttgtgcgtccattctgtggaagagcgccgacaaagcgccgctggcggctgaagcgatgggtatcatcgctccgcgtctgaaagagctgaaactgatcgactccatcatcccggaaccgctgggtggcgctcaccgtaacccggaagcgatggcggcatcgttgaaagcgcaactgctggcggatctggccgatctcgatgtgttaagcactgaagatttaaaaaatcgtcgttatcagcgcctgatgagctacggttacgcgtaattcgcaaaagttctgaaaaagggtcacttcggtggcccttttttatcgccacggtttgagcaggctatgattaaggaaggattttccaggaggaacacatgaacatcattgccattatgggaccgcatggcgtcttttataaagatgagcccatcaaagaactggagtcggcgctggtggcgcaaggctttcagattatctggccacaaaacagcgttgatttgctgaaatttatcgaacataaccctcgaatttgcggcgtgatttttgactgggatgagtacagtctcgatttatgcagcgatatcaatcaacttaatgaatatctcccgctttatgccttcatcaacacccactcgacgatggatgtcagcgtgcaggatatgcggatggcgctctggttttttgaatatgcgctggggcaggcggaagatatcgccattcgtatgcgtcagtacaccgacgaatatcttgataacattacaccgccgttcacgaaagccttgtttacctacgttaaagagcggaagtacaccttttgtacgccggggcatatgggcggcaccgcatatcaaaaaagcccggttggctgcctgttttatgattttttcggcgggaataccctcaaggctgatgtctctatttcggtcaccgagcttggttcgttgctcgaccacaccgggccacacctggaagcggaagagtacatcgcgcggacttttggcgcggaacagagttatatcgttaccaacggaacatcgacgtcgaacaaaattgtgggtatgtacgccgcgccatccggcagtacgctgttgatcgaccgcaattgtcataaatcgctggcgcatctgttgatgatgaacgatgtagtgccagtctggctgaaaccgacgcgtaatgcgttggggattcttggtgggatcccgcgccgtgaatttactcgcgacagcatcgaagagaaagtcgctgccaccacgcaggcacaatggccggttcatgcggtgattaccaactccacctatgatggcttgctctacaacaccgactggatcaaacagacgctggatgtcccgtcgatccacttcgattccgcctgggtgccgtacacccattttcatccgatctaccaggggaaaagtggtatgagcggcgagcgtgttgcgggaaaagtgatcttcgaaacgcaatcgacccacaaaatgctggcggcgttatcgcaggcttcgctgatccacattaaaggcgagtatgacgaagaggcgtttaacgaagcctttatgatgcataccaccacctcgcccagttatcccattgttgcttcggttgagacggcggcggcgatgctgcgtggtaatccgggcaaacggctgattaaccgttcggtggagcgggcgctgcattttcgcaaagaggtccagcggttgcgggaagagtctgacggttggtttttcgatatctggcaaccgccgcaggtggatgaagccgaatgctggcccgttgcgccaggcgaacagtggcacggctttaacgatgcggatgccgatcatatgtttctcgatccggttaaagtcactattttgacaccggggatggacgaacagggcaatatgagtgaggaggggatcccggcggcgctggtggcaaaattccttgacgaacgtgggatcgtagtagagaaaaccggcccttataacctgctgtttctctttagtattggtatcgataaaaccaaagcaatgggattattgcgtgggttgacggaatttaaacgctcttacgatctcaacctgcggatcaaaaatatgctacccgatctctatgctgaagatcccgatttctaccgcaatatgcgtattcaggatctggcgcaagggatccataagctgattcgtaaacacgatcttcccggtttgatgttgcgggcattcgatactttgccggaaatgatcatgacgccacatcaggcatggcagagacagattaaaggtgaagtagaaaccattgcgctggaacaactggtcggtagagtatcggcaaatatgatcctgccttatccaccgggcgtaccgctgttgatgccaggagaaatgctgaccaaagagagccgcacggtactcgattttctactgatgctttgttccgtagggcaacattaccccggttttgaaacggatattcacggcgcgaaacaggacgaagacggcgtttaccgcgtacgagtcctaaaaatggcgggataacttgccagagcggcttccgggcgagtaacgtgctgttaacaaataaaggagacgttatgctgggtttaaaacaggttcaccatattgcgattattgcgacggattatgcggtgagcaaagctttctactgcgatattcttggtttcacgctgcaaagcgaagtctatcgcgaagcgcgcgactcgtggaaaggggatttggcgcttaatgggcaatatgtgattgagcttttctcttttccgttcccgccggagcgccccagccgaccggaagcttgcggcctgcgtcatctggcttttagcgttgatgacatcgatgcggcagtggcgcaccttgaaagccataacgtgaagtgtgaagccatccgtgtcgatccatacacgcaaaaacgcttcaccttctttaacgatccggacgggctgccgttggaactgtatgagcagtaaggcttgtcatcgccgcatttgcccggtaacgtgccgggcattgctactgtaaaatcgcaccatcatgacactcacgctcaatagacaacttctcacctcacgccagattctggtggcctttagcggcgggcttgactccaccgttctgctgcatcagttggtgcagtggcggacggaaaatccgggcgtcactctgcgcgctattcatgtgcatcacggtttaagtgccaatgccgatgcctgggttacgcattgcgaaaacgtctgccaacagtggcaggtgccgctggtggtcgaacgcgtacaacttgcgcaagaggggctggggattgaggcccaagcgcggcaggcgcgttatcaggcatttgcccgtaccctattgcccggcgaagtgctggtcaccgcgcaacatctcgacgatcaatgtgaaacctttctgctggcgctaaaacgcggtagcggccctgccgggctttcggctatgggggaagtctcggagtttgccggaacacggcttatccgcccgttgcttgcccgcacgcgggggggaactggcgcagtgggcattggcgcatggtttacgctggattgaagacgaaagtaatcaggacgactcatacgatcgtaactttctgcgcctgcgtgtagtgccgttattgcagcagcgttggccgcattttgccgaagcaacggcccgcagcgccgcactttgtgctgaacaagagagtctgttggatgaactgctggcggatgatttagcacactgccaaacgtcgcaggggacgctgcagattgcgccaatgctagcgatgagtgatgcccgtcgcgcggcgattatccgccgctggctggcagggcagaatgcaccgatgccttcccgcgacgcgctggtgcggatctggcaggaagtggcgctggcgcgggaagatgcctccccctgtttacgcttgggcgcgtttgaaatccgccgatatcagtcgcaactgtggtggattaaatccgtcaccgggcaaagtgaaaccattgtgccgtggcagacgtggctacaaccgctggaattaccggcggggctgggaagcgtacagcttactgcgggaggcgatattcgccctccgcgtgcagacgaagcggtcagcgtgcgtttcaaagcggcaggattgctgcatattgtcgggcgcaacggcggacgtaagctgaagaaaatctggcaagagttaggcgtgccgccgtggctacgtgacaccacgccactgctgttttatggcgaaacgctgattgcggcggcaggggtatttgtgacgcaagaaggtgtggctgaaggtgagaatggcgtaagttttgtctggcagaaaacgcttagttaagtgaaagccggataagacgcatcaaacgtcgcatccggcgaaagtcaatcaggactcgctcaccaccaccgtaccgatttccgggtggctaaagctggtaattttatccagacgtagctcacgggtttcgccagcggcctcgacgaccagatactccacatttttgcgggagactaaatcgctggcttttgcctgcaatttttcgccatctttcagctcaagtgtcagcattaaatgatgctggcaggcgagctcaagattatcgtaatcatcacaattgattggttgatacgtatcattcattgacataatcgctcaccagtaagtttgccgcagcgtatgctgctttttccctgacagcctcagaaagggcgtcgtcggcagccatttcattcagcactttcaaaacgcagcccagcgcgtccggaacgtatcctaagtctccgctggcgatttccgcgtaccgcttgcgtattaactcacaatatttttccacatgccctcctgtcagcactctgacttaaccgtggatgcaagtctaagcctacgaagataaactctgtttcgcaaggtgactataccacactcatttctgcaatatcagcgccgcaactgcacgtattccgttacaatggcctcctgattcgaaaggagttttcttatggcgcttaaagcgacaatttataaagcgacggttaatgtggccgatctcgaccgcaaccagtttctcgatgcctctctgacgctggcgcgccacccttcagaaacccaggagcgtatgatgctgcgcttgctggcgtggctgaaatatgctgatgaacgtctgcaatttacccgtggtttgtgtgccgatgatgagccggaagcgtggctgcgtaacgatcacctgggcattgatttgtggattgagctgggctgccggatgagcggcggattaagaaagcctgcacccaggccgcagaagtggcgctgtttacctataatagtcgggcggcgcaaatctggtggcagcaaaatcagagcaaatgtgtgcagtttgccaatctttccgtctggtatctggacgatgaacaactggcgaaagtaagcgcctttgccgatcgtaccatgacgctgcaggcaacgattcaggatggcgtgatctggttatcggacgataagaataatctggaagttaacttaaccgcctggcaacaaccttcatgattgtgatttcccgacatgttgctattcccgatggtgagcttgagatcaccgccattcgtgcgcagggcgcgggcgggcagcatgttaataagacctcaacggccattcatctgcgttttgacattcgggcgtccagcctgccagagtattacaaagagcgtctactcgccgccagccatcatttgatcagcagtgatggcgtgattgtcattaaggcacaggaataccgcagtcaggaactgaaccgcgaagccgcgctagcccggctggtggcagtgattaaagatttaacaacagaacaaaaagcccgacgacccacgcggcccacccgtgcatcgaaagagcgcaggctggcatcgaaagcacaaaaatcaagcgtgaaggcgatgcgcggcaaagtacgcagcggtcgggaataaaaagaaggaatagatggtgaaaaaagcgatagtgacagcgatggctgtaatcagcctctttactctgatgggatgtaataatcgggccgaagttgatgcgctttctccggcgcaggctgccgaactgaaaccgatgccgcaaagttggcgcggcgtgctgccgtgtgctgattgcgaaggaatcgaaacctctctgttcctcgaaaaagacggaacatgggtgatgaatgagcgttatctcggtgctcgtgaagaaccttcctccttcgcttcctacggtacatgggcgcgaaccgctgacaagctggtattaaccgacagcaaaggtgaaaagtcatattatcgggcgaaaggcgatgcgctggagatgctcgatcgtgaaggcaatccgattgaatcgcagttcaactatacgctggaaccggcacaatccagtttacctatgacgccgatgaccctgcgaggcatgtatttttatatggctgatgcggcgaccttcactgattgcgcgaccggaaacgtttcatggtagcgaataacgcagagctggagcgtagctacctggctgcgcgcggtcacagtgaaaaaccggtgttactgtcagtagaaggtcactttacgcttgaggctaatccggatactggtgcgccaaccaaagtattagcgcccgatacggcgggtaaattttacccgaataaggattgcagtagtttggggcagtaaacctgcttaaggcagaaacaaacgcaaaattgcctgatgcgctgcgcttatcaggccttgtattatccctccagtgcagagaaaatcggccagttttctctgcctgcagtccgcatgccgtatcgggccttgggttctaacctgttgcgtagatttatgcagcggactgcctttctcccaaagtgataaaccggacagtatcatggaccggttttcccggtaatccgtatttgcaaggttggtttcactatggaacatgaacttcattatatcggtatcgacaccgctaaagagaaactggatgtcgatgtgttgcgtcctgatggtcgtcatcgcaccaaaaaattcgctaacaccactaaagggcacgatgagctggtgagctggctgaaaggtcacaagattgaccatgcgcatatctgcatcgaagcgaccggcacctatatggaacctgtcgctgagtgcctttacgatgctggctacatagtgtcagtcattaatcctgcgctgggtaaagctttcgctcagagtgaaggactgcgtaacaagactgataccgtggatgcgcgcatgctggcagagttctgtcgtcagaagcgccctgcagcctgggaagcgcctcacccgcttgaacgcgcgttgcgtgccctggtagtccgccaccaggcgctgacagatatgcacacgcaggaactgaatcgcactgaaacggcgcgggaagtccagagaccgagcattgatgctcaccttctgtggcttgaagcagagctgaagcgtcttgagaagcagataaaagacctgacagacgatgatccggatatgaaacaccgcaggaaactgctggaaagcatcccgggtatcggagagaaaacatctgcggtattgctggcttatatcggtctgaaggaccgcttcgcccatgccagacagttcgccgcttttgcgggtctgacaccacggcgttatgaatcaggtagcagtgtgagaggggcgagccggatgagtaaggccggacatgtgtcgcttcgcagggcgttgtatatgcccgcaatggtagccaccagtaagactgagtgggacggcgtt

SEQ ID NO: 109 - DNA, 14314 bp, Escherichia coli
gaccgtctggcggctaatggcaagaaaggaaaggtgattctcggcgcgatgatgcgcaagctggcacaggtggcgtatggagtgctgaagtcaggcgtgccgttcgatgcgtcacggcataatccggtagcggcgtaaaaatcgcggaagggatgaaaaaaacagcgcctgacggcgctgtgtctggcatgcctgcaatccgggaaaccggaccaggaaaaaacttgcaggccataacagtatctacagcatataatgcaacattttgaattagcacgattttgtaggccggataaggcgtttacgccgcatccggcattttgtgcacgaggctggctttatcactgagtcagcccaacaaagcgacccgccttgatataaatcccaggcttcaggtgcccaacatactgtaactgcgtttctggcttaaacgcagagacatcaccaatacgcatatgcatcagatcggcagggctaatccagcccgattgcgccagtgtaagtggatgcccggctttggcaaaggcatccgtgacaaattccgaacaaaaccacgactttttgtctccttcgcccacactgcttaactgcgctttcgccaggccgctgacgcactttggcgaaaatcctcggagaacggattcagtgagcacatctggcgagtcaccataaagggaataaattcgacaatgccgcgatagttataaccgctatctttgattttattggcaaacgcggtgatatctgtggcttgttgcggggtaagatccgggactcgtaagacgaaaagcttatcactatgcttcatcgcttttttaagggaaacaatctggacgccagcgcctgtcgcttctgcaacgttattatcacccagaaagattgcaacgtgactcacagaggaagtgctgaagacgcggattccaaatgaggttaccccaaggcttgaggagaacagcaaatcgccgggtttgagatcaggtgccgttatttcttttattgattgttcggtgaaagagctttgatgctggaatttgacagcccatgtttttgcctcggcatctactgctgtggctgatgggtctggctggctgatatcaacggtacaagccgaaagtaaaagaaagctggggagaaacaggcggcagtacgcctttggtttatccattttatacaatccatgtaaaaaagggccctgaaattcaggaccctttctggcatcagcctttaatctgtttcaccagatattcgacgatgtcaccagtcttaattaactgtttctcgccgttgcgacgatatttatattcgatatcgtcgttgtcgaggttacggtcgcccagcacaatagtgtgcggaataccgatcagttccatatcggcaaacatcacgcccggacgttcttttcggtcatccagcagcacttcgataccttgtgcacgcagttcgctgtacagtttctcagcaagctcttgtacgcggaaggatttgtgcatgttcatcggcagaatcgccacctggaacggcgcgatagcgtcaggccatacgatgccgcgttcgtcgtagttctgctcaatcgccgcagctaccacacgcgttaccccgataccgtagcaacccatcgtcaggatttggttacggccatcttcaccctgtacggaggctttcagtgcttcggagtacttggtacccagctggaagatgtgaccaacttcgataccacgtttgatcagcagcgtaccctggccatccgggcttggatcgcccgccaccacgttgcggatatcagcaatttccggggtagcgacatcgcgatcccagttgatgccgaagtagtgtttaccatcgatgttagcaccagcagcgaaatcactcatcgccgcaacggtacggtcaatcaccaccggaatcggcatgtttaccggacccagtgaacccggaccggcgttaaccacggcacgaatttcttcttcggtcgcgaaagtcagcgggctggcaacctgcggcagtttttctgctttaacttcgttcagttcgtggtcaccgcgcaccagcagcgcaaccagcgggaagctactgccttcaaccgctttaaccagcagagtcttaaccgttttctcaatcggcagattgaactgttcaaccagttccgcgatggttttcgcgttcggcgtatcaaccagcgtcatttcctgggtagcagcagcgcgcggttctttcggcgcgatagcttctgccagttcaatgttcgctgcatagtcagaggtgtcggagaagaccacatcgtcttcaccgctctgcgccagcacctggaattcgtgagaggcgctgccgccgatagaaccggtgtcggcctgtacggcgcggaaatccagccccatgcggctgaagattttgctgtaggccgcatacattgcatcgtaggtttcctgcagggattcctgagaagtatggaaagagtaagcatctttcatcaggaattcgcgggaacgcatgacgccgaaacgcggacgcacttcgtcgcggaacttggtctggatctgatagaagttcagcggcagctgtttgtaagagctaagctcgttacgaatcaggtcagtgataacttcttcatgagttgggccgagtacgaacggacgctcgccacggtcaacaaaacgcagcagttccggaccgtactgttcccaacgaccactctcttgccacaaatcggctggctgaaccaccggcatcgacacctcgatcgcaccggcgttgttcatctcttcacgcacgatgttttcgacttttttcagaacgcgcacgccggtcggcagccaggtatataacccggaggccagcttgcggatcatcccggcgcgcagcatcagctgatggctgatcacctcgcgtcggcaggtgtctccttgagagtggagagcaggtattggctagtacgcatgttgttacggttccagttggaaggtagaacaggctcaaggcgagcctgggacaaaaaaaagtgatttagtttaccagtgcaaaagaaatgtcaaaagagaagggcgtgaatttaacgcggttccagcgcaaagacttcaaaacctgcgtcggtgacgcgccagcgaacgttaaaatcatgtagccagacggcataggttttgcccgtttcctcacctttacgataggccgggcgcgggtcctgcgccagtacttcgcggataaacagcgttaactgcggataacgcttctccagcgtcaaaagctgcttttcgacctctgcggtaaaactcaccgccatctctgccgctggcgcactttgcgcatagctggcactggcatcgggaagcgattcggcaaaggggagatacggtttgatatccaccaccggcgtaccatcgaccagatccagactgccgagcttcagaatcacgctgtctttatggcaaacaacctctttcagctctaccagcgacataccaattgggttagggcggaaagtagagcgtgttgcgaaaacccccattctggcgttaccgccgaggcgcggtggacgcacagtcggacgccagccgccttccatcgtttgatgaaagacgaaaaggatccataaatggctgaacgcttccaggccgcgaacggcgtcggcctggttgtagggagcaatgagatgcagttcgccgttggcgctttttaccagacctggctggcgcggaacggcgaatttttctttatagggtgagcgaataacgcctatttgctcgaactggaaactgctcatttcgccgtaatgttaagcgcagagccgatacatacagcctgacgatagcagcctggcgtaccgctggtgacttcgcagctatgcagtaataccgcattggctttcattttagaggcgttgatttgcatccgcttacgcgcggttggaatgctcggcggagagtcctgattggaggcctggcaagaatcgccactgacttcaccgagatcgcggaacggtttgccgactaattcttctgcattggtataaattcggaccggcgtggcgcgcggcgctttcggttttgcaggctccgctttcggctggggtgcagtgctttgaacgggttcgacaggggatctgcttaacatggaacagccgcttagcatgagtgctactaaacagatcggtaaagcacgcatagtatttcctcaatgtatgatcaaaacgtcaatattgaatcaggagcttgtaaaaatgacaagacgggcaagcgcccgtcctgaatgatattacaaattgtggaaacagcctaaaaattaccagcctttaacagcgccgccgttaaacactttgtttgctgcttcgtaaacttcatcagactgataagcctggacgaatttcttcacgttctcggcgtctttgttatcttcacgcgttacgatcaggtttacgtacggggagtctttatcttcgacaaagataccgtctttagctggagtcaggccaatctggctggcataggtggtgttaataactgccagagcgatttgcgcgtcgtccagagagcgaggcagctgcggtgcttccagctcaacaattttcagattttttgggttctcaacaacatcaagaacggtcggcagcaggccaacgccatctttcagtttgatcaagcccactttttgcagcagcagcagtgaacgaccaagattagttggatcgtttggcacggcaacctgcgaaccatcctgcagttcatccagtgatttgattttcttggagtaaccagcaatcggataaacaaaagtgttgcctactgcgaccagtttgtagccacgatctttcagttgctgatcaaggtacggtttatgctggaaggcgttggcgtcgatatcgcctttgctcaatgcttcgtttggcagaacatagtcgttgaaggttaccagctcaacgtccaggccatatttgtctttcgcaactttctgcgcgacttctgctacctgctgttcggcaccaacaatcacgccgactttaatgtggtttggatctttttcatcctgaccgcagcctaccagtgccagtgatccaatcagggctcccactgccgcaaaggttttgaatttgaacgccataccttattccttcttcaattatttatgttgtgttgaacgttacttgcgagtgacagcccggacgatgcggtcgcctgcgaactgaattaaataaaccagaatgaccagcaataccagtaccgtattcatcaccgtcgcgttatagccgatgtagccatactgatagccaatctgacctaaaccaccggcaccgactgcaccacccatcgcggaataaccgaccagggtaatcagggtgatagttgccgcattcaccagacccggcaatgcttccggtaacagcactttacggacgatctgcatcggcgtggcacccattgcgcgggaagcttcaattaacccggttgggatctccagcagagcgttctcgaccatacgggcaataaacggtgctgcaccaacggttaacggaacaatcgctgcctgcaaaccaatcgatgtaccaacaataacgcgggtaaacggaatcatccataccagcaagataatgaacgggatagaacggaaaatgttcacaatcgcagaaacggtacgatacagcttcgcgttagcaataatttgccccggacgcgtgacataaagcagaacgccaaccggcagaccaatcacaaagccaaaaaaaccggatacgaaggtcattgccagcgtttcccatacgccacgaaccagcagccacatcatcggctcagacataacccagtacctctacttttacatggtgttcctgcagccaggcaatggcggcttgcgtatcttgttgtgtgccgtgcatttcagtcagcatgatgccgaacttaacgccaccggcgtagtccatctgcgcgctaataatgttgttgttgacgttgaaacgacgcgcggtttcagaaagcagtggggcatcgaccgactgaccggtaaactccagacgcagcatcggcacgcagtcagtgaatggctccgcttgcagacgttcctggtaatcttccgggatatccagatgcagggtcgactgaataaacttctgcgccaacggcgttttcggatgcgaaaacacttcacttaccgtgtcctgctcgatcagttcgccattgctgatgaccgccacgcaatcacaaatacgctttacaacgtccatttcgtgggtgatcaacagaatcgtcaaacccagacggcggttaatgtctttcagcagctcgagaatagaacgtgtcgttgccgggtccagcgcgctggtggcttcatcacacagcaatactttgggattgctggctaacgcacgggcaatcgccacacgctgtttctgcccaccggaaagattcgatgggtagctatcatgcttatcgccaagaccaaccaatgacagcaattccgtcacgcgacgtttgatctcgtctttcggtgtgttgtccagctccagcggcagagccacgttgccaaaaacagtacgcgaagagagcaggttaaaatgctggaaaatcataccaatctggcggcgagctttggtcaactcggattctgacagcgtggtcagttcctggccatcgaccagcacgctaccctcggttgggcgctccagcaggtttacacaacgtataagcgtactcttacccgcgcctgaggcaccgataacgccataaatttgtccagctggcacatgcaggctgacgttgttcaacgcctggatggtgcgggtgccctggtggaacactttggtgatattcgaaagttttatcattgattatttattatcgtcattaagttagtcgtggcatctcgaatgcctgaaacgggcaacgccgtcaatgaaatggatgttaaggcatccagacgtctaaatcaatcaggtttatgcgaagagcactttcttgcaggtcgaaacatgcgatactagcgtcacatgccttattaaggagctataaaaggtggcaaagagcgtacccgcaatttttcttgatcgtgatggcaccattaatgtcgatcacggctatgtccatgagatcgacaactttgaatttatcgacggtgttattgacgccatgcgcgagctaaaaaaaatgggctttgcgctggtggtagtaaccaaccagtctggcattgctcgcggtaaatttaccgaagcacagtttgaaacgctgaccgagtggatggactggtcgctggcggaccgagatgtcgatctggatggtatctattattgcccgcatcatccgcagggtagtgttgaagagtttcgccaggtctgcgactgccgtaaaccacatccggggatgcttttgtcagcacgcgattatttgcatattgatatggccgcttcttatatggtgggcgataaattagaagatatgcaggcagcggctgcggcgaacgtgggaacaaaagtgctggtgcgtacgggtaaacctattacgcctgaagcagaaaacgcggcggattgggtgttaaatagcctggcagacctgccgcaagcgataaaaaagcagcaaaaaccggcataatgattaaaagatgagcaattgaaataaaaatgcatttttccacttgtcttcctgagacgactccctataatgcgcctccatcgacacggcggatgtgaatcacttcacacaaacagccggttcggttgaagagaaaaatcctgaaattcagggttgactctgaaagaggaaagcgtaatatacgccacctcgcgacagtgcgctaaagcgcgtcgcaactgctctttaacaatttatcagacaatctgtgtgggcactcgaagatacggattcttaacgtcgcaagacgaaaaatgaataccaagtctcaagagtgaacacgtaattcattacgaggtttaattctttgagcatcaaacttttaaattgaagagtttgatcatggctcagattgaacgctggcggcaggcctaacacatgcaagtcgaacggtaacaggaagcagcttgctgcttcgctgacgagtggcggacgggtgagtaatgtctgggaaactgcctgatggagggggataactactggaaacggtagctaataccgcataacgtcgcaagaccaaagagggggaccttcgggcctcttgccatcggatgtgcccagatgggattagcttgttggtggggtaacggctcaccaaggcgacgatccctagctggtctgagaggatgaccagccacactggaactgagacacggtccagactcctacgggaggcagcagtggggaatattgcacaatgggcgcaagcctgatgcagccatgccgcgtgtatgaagaaggccttcgggttgtaaagtactttcagcggggaggaagggagtaaagttaatacctttgctcattgacgttacccgcagaagaagcaccggctaactccgtgccagcagccgcggtaatacggagggtgcaagcgttaatcggaattactgggcgtaaagcgcacgcaggcggtttgttaagtcagatgtgaaatccccgggctcaacctgggaactgcatctgatactggcaagcttgagtctcgtagaggggggtagaattccaggtgtagcggtgaaatgcgtagagatctggaggaataccggtggcgaaggcggccccctggacgaagactgacgctcaggtgcgaaagcgtggggagcaaacaggattagataccctggtagtccacgccgtaaacgatgtcgacttggaggttgtgcccttgaggcgtggcttccggagctaacgcgttaagtcgaccgcctggggagtacggccgcaaggttaaaactcaaatgaattgacgggggcccgcacaagcggtggagcatgtggtttaattcgatgcaacgcgaagaaccttacctggtcttgacatccacggaagttttcagagatgagaatgtgccttcgggaaccgtgagacaggtgctgcatggctgtcgtcagctcgtgttgtgaaatgttgggttaagtcccgcaacgagcgcaacccttatcctttgttgccagcggtccggccgggaactcaaaggagactgccagtgataaactggaggaaggtggggatgacgtcaagtcatcatggcccttacgaccagggctacacacgtgctacaatggcgcatacaaagagaagcgacctcgcgagagcaagcggacctcataaagtgcgtcgtagtccggattggagtctgcaactcgactccatgaagtcggaatcgctagtaatcgtggatcagaatgccacggtgaatacgttcccgggccttgtacacaccgcccgtcacaccatgggagtgggttgcaaaagaagtaggtagcttaaccttcgggagggcgcttaccactttgtgattcatgactggggtgaagtcgtaacaaggtaaccgtaggggaacctgcggttggatcacctccttaccttaaagaagcgttctttgaagtgctcacacagattgtctgatgaaaatgagcagtaaaacctctacaggcttgtagctcaggtggttagagcgcacccctgataagggtgaggtcggtggttcaagtccactcaggcctaccaaatttgcacggcaaatttgaagaggttttaactacatgttatggggctatagctcagctgggagagcgcctgctttgcacgcaggaggtctgcggttcgatcccgcatagctccaccatctctgtagtgattaaataaaaaatacttcagagtgtacctgcaaaggttcactgcgaagttttgctctttaaaaatctggatcaagctgaaaattgaaacactgaacaacgagagttgttcgtgagtctctcaaattttcgcaacacgatgatgaatcgaaagaaacatcttcgggttgtgaggttaagcgactaagcgtacacggtggatgccctggcagtcagaggcgatgaaggacgtgctaatctgcgataagcgtcggtaaggtgatatgaaccgttataaccggcgatttccgaatggggaaacccagtgtgattcgtcacactatcattaactgaatccataggttaatgaggcgaaccgggggaactgaaacatctaagtaccccgaggaaaagaaatcaaccgagattcccccagtagcggcgagcgaacggggagcagcccagagcctgaatcagtgtgtgtgttagtggaagcgtctggaaaggcgcgcgatacagggtgacagccccgtacacaaaaatgcacatgctgtgagctcgatgagtagggcgggacacgtggtatcctgtctgaatatggggggaccatcctccaaggctaaatactcctgactgaccgatagtgaaccagtaccgtgagggaaaggcgaaaagaaccccggcgaggggagtgaaaaagaacctgaaaccgtgtacgtacaagcagtgggagcacgcttaggcgtgtgactgcgtaccttttgtataatgggtcagcgacttatattctgtagcaaggttaaccgaataggggagccgaagggaaaccgagtcttaactgggcgttaagttgcagggtatagacccgaaacccggtgatctagccatgggcaggttgaaggttgggtaacactaactggaggaccgaaccgactaatgttgaaaaattagcggatgacttgtggctgggggtgaaaggccaatcaaaccgggagatagctggttctccccgaaagctatttaggtagcgcctcgtgaattcatctccgggggtagagcactgtttcggcaagggggtcatcccgacttaccaacccgatgcaaactgcgaataccggagaatgttatcacgggagacacacggcgggtgctaacgtccgtcgtgaagagggaaacaacccagaccgccagctaaggtcccaaagtcatggttaagtgggaaacgatgtgggaaggcccagacagccaggatgttggcttagaagcagccatcatttaaagaaagcgtaatagctcactggtcgagtcggcctgcgcggaagatgtaacggggctaaaccatgcaccgaagctgcggcagcgacgctgatgcgttgttgggtaggggagcgttctgtaagcctgtgaaggtgtgctgtgaggcatgctggaggtatcagaagtgcgaatgctgacataagtaacgataaagcgggtgaaaagcccgctcgccggaagaccaagggttcctgtccaacgttaatcgggcagggtgagtcgacccctaaggcgaggccgaaaggcgtagtcgatgggaaacaggttaatattcctgtacttggtgttactgcgaaggggggacggagaaggctatgttggccgggcgacggttgtcccggtttaagcgtgtaggctggttttccaggcaaatccggaaaatcaaggctgaggcgtgatgacgaggcactacggtgctgaagcaacaaatgccctgcttccaggaaagcctctaagcatcaggtaacatcaaatcgtaccccaaaccgacacaggtggtcaggtagagaataccaaggcgcttgagagaactcgggtgaaggaactaggcaaaatggtgccgtaacttcgggagaaggcacgctgatatgtaggtgaagcgacttgctcgtggagctgaaatcagtcgaagataccagctggctgcaactgtttattaaaaacacagcactgtgcaaacacgaaagtggacgtatacggtgtgacgcctgcccggtgccggaaggttaattgatggggttagcgcaagcgaagctcttgatcgaagccccggtaaacggcggccgtaactataacggtcctaaggtagcgaaattccttgtcgggtaagttccgacctgcacgaatggcgtaatgatggccaggctgtctccacccgagactcagtgaaattgaactcgctgtgaagatgcagtgtacccgcggcaagacggaaagaccccgtgaacctttactatagcttgacactgaacattgagccttgatgtgtaggataggtgggaggctttgaagtgtggacgccagtctgcatggagccgaccttgaaataccaccctttaatgtttgatgttctaacgtggacccgtaatccgggttgcggacagtgtctggtgggtagtttgactggggcggtctcctcctaaagagtaacggaggagcacgaaggttggctaatcctggtcggacatcaggaggttagtgcaatggcataagccagcttgactgcgagcgtgacggcgcgagcaggtgcgaaagcaggtcatagtgatccggtggttctgaatggaagggccatcgctcaacggataaaaggtactccggggataacaggctgataccgcccaagagttcatatcgacggcggtgtttggcacctcgatgtcggctcatcacatcctggggctgaagtaggtcccaagggtatggctgttcgccatttaaagtggtacgcgagctgggtttagaacgtcgtgagacagttcggtccctatctgccgtgggcgctggagaactgaggggggctgctcctagtacgagaggaccggagtggacgcatcactggtgttcgggttgtcatgccaatggcactgcccggtagctaaatgcggaagagataagtgctgaaagcatctaagcacgaaacttgccccgagatgagttctccctgactccttgagagtcctgaaggaacgttgaagacgacgacgttgataggccgggtgtgtaagcgcagcgatgcgttgagctaaccggtactaatgaaccgtgaggcttaaccttacaacgccgaagatgttttggcggatgagagaaagattttcagcctgatacagattaaatcagaacgcagaagcggtctgataaaacagaatttgcctggcggccttagcgcggtggtcccacctgaccccatgccgaactcagaagtgaaacgccgtagcgccgatggtagtgtggggtctccccatgcgagagtagggaactgccaggcatcaaattacgaagaatggcactgacctttgaggcagttcactactcgataagagagtaggacaaaagcgaaagcttttgaacgttgcgaagcaacggcccgaagggtgaatcacgaagtgattcataaactgccaggcatcaaattaagcagtaagccggtcataaaaccggtggttgtaaaagaattcggtggagcggtagttcagtcggttagaatacctgcctgtcacgcaggggtcgcgggttcgagtcccgtccgttccgccacttattaagaagcctcgagttaacgctcgaggtttttttcgtctgtatatctattattgccagaatcgcaaaaatcctctgcattttacgctctttttcctcaacagtctgaagcccataatcacctcagttaacgaaaatagcattaaaagaggcatattatggctatccctgcatttggtttaggtactttccgtctgaaagacgacgttgttatttcatctgtgaaaacggcgcttgaacttggttatcgcgcaattgataccgcacaaatctatgataacgaagccgcagtaggtcaggcgattgcagaaagtggcgtgccacgtcatgaactctacatcaccactaaaatctggattgaaaatctcagcaaagacaaattgatcccaagtctgaaagagagcctgcaaaaattgcgtaccgattatgttgatctgacgctaatccactggccgtcaccaaacgatgaagtctctgttgaagagtttatgcaggcgctgctggaagccaaaaaacaaggtctgacacgtgagatcggtatttccaacttcacgatcccgttgatggaaaaaacgattgctgctgttggcgctgaaaacatcgctactaaccagattgaactctctccttatctgcaaaaccgtaaagtggttgtctgggctaaacagcacggcatccatattacttcctatatgacgctggcgtatggtaaggccctgaaagatgaggttattgctcgtatcgcagctaaacacaatgcgactccggcacaagtgattctggcgtgggctatgggggaaggttactcagtaattccttcttctactaaacgtgaaaacctggaaagtaatcttaaggcacaaaatttacagcttgatgccgaagataaaaaagcgatcgccgcactggattgcaacgaccgcctggttagcccggaaggtctggctcctgaatgggattaagcctctctgacagctcctccgggagctgtttttacatgctcgctaaggaaa

SEQ ID NO: 110 - DNA, 52999 bp, Escherichia coli
  modified_base (30149)..(30149): a, c, t, g, unknown or other
  modified_base (30173)..(30173): a, c, t, g, unknown or other
  modified_base (30186)..(30186): a, c, t, g, unknown or other
  modified_base (30210)..(30210): a, c, t, g, unknown or other
ggtctggctcctgaatgggattaagcctctctgacagctcctccgggagctgtttttacatgctcgctaaggaaatcgataaaagcccggatgcgcgtacttaccgcacggtcgctgtaatagactgcactgaatggcatttccactggcaacactttatctgccattaactccaccaattctccgcgagcgatttctttgtcgatcatgtagtcggacaaacacgcaatcccgttgccactcaggcaaagctgtttcagtgtttccccactattggatgacaaaccgtacttcacctcatgtaattgtccatcgctacgggctatcggccaggtattgagggaagcgggttcagtgaatcccaggcaaatatgttgctttaaatcgtcgatcgtttctggcttcccgtagcgggaaatataatcgggggaggcgataatttttcgataactgttaaataacggcctggcacgtaagctggaatccgttaacgtaccagcgcgtatcgcgacatccacttttctttcgatcaaattaataatcgtttcggaggagactagcgacaaagtgacttccggatagcgttcacggaaaggcttaattaacggcatcagaaagtgcagcaccactggagttgcggcatcgatccgtaacagtccacgcggtgtattacgcgtctccataatttctgattctgccgatgccatctcctgcaaaattgactgtacgcgacgaaaataacgctcgccttcttccgtcaggctaagttgtcgcgtggtccgattaagcaggctaacgccaagtttcatctccagctttttcaccgcccggcttaccgctgagtttgcttgccctaattgttccgctgcccggctaaagctgccgctttcgacgaccgaaacaaaaatggcgagttcttccgacgtggctttcatttttgctcctgttgcaaaatagaagagatattttgaatttatttgtcattaaaccatcaggatgcgtgatatgtcatgcgatttaatgttctccataatgagcaaaattctgaccggtgtaagcacttgcttacataacaatatacaattgctcgttgaaagagtgagctaaaatccctataacagtagaaccctcccgagtgcggaagggttgacgtaatagaggtttcaaagtcaaaagtgcgaaaaaacacctatgccatgcgctatgttgccggacaacctgcggaaaggatcttaccgccggggtcttttgcgagcatcggccaggcattaccacctggagaaccgttaagtaccgaagagcgtattcggatcctggtgtggaacatatacaaacagcaacgcgctgaatggttgtcggtattaaagaactacggcaaagatgcacatctggtgttattgcaggaagcgcagacaacgccagagttagtacagtttgcgaccgctaactatcttgccgccgatcaggtacccgctttcgtactgccacaacatccttctggcgtaatgaccctttcggcggcgcatccagtgtattgctgcccgttacgtgaacgagaacccattttgcgtctggcgaagtcggcactggtgacggtctatccattacctgacacccgcctgttgatggtggttaatatacacgccgtcaacttcagtctgggcgtggatgtctatagtaagcagttacttcctattggtgatcagatagctcaccacagcggcccggtcattatggcaggagatttcaatgcctggagccgtagaaggatgaacgcgttatatcgctttgcgcgggaaatgtcgctgcgccaggtgcgttttaccgatgatcagcgccgtcgggcgtttggccgcccgctcgattttgttttctaccgtggtctgaacgtcagcgaagcttctgtactggttacgcgcgcttccgatcacaatccgctactcgttgaattcagtcccggcaagcctgataaataaggtatgtcaggtctgccacagggcagaccaacgtttggcgctgtccttttatactcaaacaacaaaaggacagcgcaatgacaacacaatcccaccatgaccacgtagaaaagcagtttagctcgcaggccagtgagtatttaactagtaccgtacatgcatccgggcgagatttacagcgcctggcggtgcgtctggctgattatcctgatgcaagtgtacttgatatgggctgcggagcagggcatgccagctttgtcgctgcgcagaacgtgagcgcggtggtggcgtatgacttatctgcccaaatgctggatgtcgtggcacaagctgccgaagcccggcaactgaaaaatatcaccacccgccagggttatgccgaaagtctgccatttgccgataacgcatttgatattgttatcagccgttattctgcccatcactggcatgatgttggtgcagcactgcgagaagtgaataggatattgaaacctggcggtaggatgattgtgatggacgtaatgtctccgggtcatccagtgcgcgacatctggttacagacggtagaagcattacgcgatacctctcacgtacgaaactacgccagcggtgagtggttgaggttaatcaatgaagccaatctgatagttgataatttaattacagataagttaccgctggaattttcttcatgggtcgcgagaatgcgtacgccagaagcgttagtagacgctattcgcatttaccaacagagcgcatcgacagaggtgagaacgtattttgccttgcagaatgatggctctttcaccagtgatatcatcatggtagaagcacataaagcagcataaataaaaaaggcaccgggggaatcggtgcctttttattatctggtttgtcaggaatctggcatgttgttgtttttcacaaacaacgtcagcttgtcgcctggttgcagattcgcagtgtcgctgttccagcgcatcacatctttgatgttcacgccgtggcgtttagcaatgcttgaaagcgaatcgcctttgcgcacacgatacgtaatgctatcgctgttgtttgccagtcgctgtgcgctactgcctgcaccaatcgtcaaactttggcctggcttcagcttagatccgcgcagtttgttccactgctgcaaatctttggtgcttacgccgagacgtgaagcgatacttgaaagcgtgtcgccagagcgtacggtgtaaacacggctgttaagcggcgtattgtcggcaaccagcgtcgactgtacagcagcaatttcgcctgaagcgagagattcacgcagttgatctgcatgcttctttggcaccatcacgtattgcggaccacttgcgcccagcgtggagcctttcacgccagcgttgaatgtcttcagcttgctgacggaaatccccgccatatctgcaaccttcgccatttcaaccgggctgctcaggtgcacacgcgccagagcacggctttcatcggtcgttggcagacgtacgccataacgcttgctgtttttgagaatatcactcaatgccagcattttaggcacgtactgcttcgtttcctgcggcaacggtaacgaccagaagtccgtggatttcccacgcgctttgttcgttttaattgccttcatgacccgaccttcgccgctgttataagccgctacggtcagaagccagtcgccgtcaaacatcttgttcagacgctgcatcatgttcagcgcggcagttgttgaagcaacaacatcgcgacgcgcgtcataattgcgggtctgtttcaaaccataattgcgccccgtgctcggaatgatctgccagatgcctgcggcattggcgccagacgttgcgtgaggatcaaaagcgctctccactatgggtagtagtaccagttccataggcatgttacgttttttaacttgcccggctatccagtacatatacggctctgcccgtaaagttacatcgtggagatagctcttattgcgtaaatatttctgtttctgttcgcgaatccggtcattttccggaattcccatctttagctcgtcgccaatgaaagcccacaagtcaccatctggcgcgatagacgtcccatcgtccatccatcgtgcctgacttgtaaactttgctgcttccccttgaccagctgcagaaaggctctgtgcgtgctgttgaacgttgccggtactctggcaacccacgagcaggacagaggcgagtaatatcgcttttgccttcatgtgtgtgtcaatagttgcttaaaagacgaccgatcataacggcgaacggagccgatgacaagaaagttttatcagaacctatctttctttgaccttaaccatgcaaaacgttcttcaggttgttgcaataatgtttcttcattaattacattaattaaatcaatatcttctgttcttaaaaaaacattaatttgccgctcatttttcagaattacgggtagtgttatttgattttttgcccgtaactccttaactttacgataataatcatttatggacaaatcgtgcggaagaatactcaaagcaaacttcatatttgataacgtatattcatgagcacaacataccaatgtatcgtcaggtaacgcacttaacttattaagtgattgatacatttgtgatgctgtcccttcaaacaacctaccacacccaccagaaaacagcgtgtcgccgcaaaatagataaggtttactgaagtaacagatatgtcctaaagtgtgacccggtgtggcaattacactaaattcatgccccaaaacgaaggcagtttcgccatctttgactacctgtgttgttcccttatcttgtgtctcttgtggaccatacaccacaatttgcggaaacttttccaccagttcttttacgccgccaacgtgatcgtgatgatggtgggtgagaaatatggcctccggttgccagttattggcggtaatggcgtttaatactggctctgcgtctccgggatcgacaatcaggcagcgacctgcttcatcattcaaaacccagatgtaattgtcatcaaaggcgggaatactgttaagattcatagattacctcttagtgtgaaacggaaggttgtgatgaaaccggcaagagtccctcaaactgtcgtggctcctgattgctggggcgatttgccctggggagagctttatcgcaaggcgctggagcgccagctcaacccgtggttcactaaaatgtatggttttcatctgcttaagattggcaatttaagcgcagaaatcaattgcgaagcgtgcgcggtttctcatcaagtgaatgtttctgcgcaaggaatgcccgtccaggtacaggcggacccacttcatcttccttttgccgataaatccgttgatgtttgtctactggcacatacattgccgtggtgcaccgatccgcatcgtttattgcgtgaagccgatcgggtattgattgatgatggctggctggtgattagtggcttcaatcccatcagtttaatgggattacgcaaacttgtgccggtattgcgcaaaacctcgccctataacagccggatgtttactctgatgcggcaactggactggctctctttgttgaattttgaagtgctgcacgccagccgtttccacgttctcccgtggaacaaacacggtggaaaactattgaatgcacatattcctgcgcttggttgcttacaacttattgttgcccggaaacggactattcctttaacgctaaatccgatgaaacagagtaaaaacaagccacgaattcgccaggcggttggagccacccggcaatatcgtaaaccacaggcttaaacttcgacttgatagcctgtatcttccagtgtgggattcattgccgcagcacgggccagttcatcacagcgttcgttttccgggtgtccggcatggcctttaacccattcccatttgatttgatgctgccccaatgcagcatcaagacgttgccagagatcgacattttttactggttttttgtctgcggttttccagccacgttttttccagctatggatccactgagtgatcccctggcggacatactggctgtcggtactcaaaatgacttcgcaatgttcttttaacgcctccagcgcgacaatagcggccatcaactccatacggttgttggtggtgcgggtgtagcctgcgctaaaggttttctcgcgtccgcgatagcgtaaaatagcgccgtaacccccaggtcctggattgcccagacacgaaccatcggtgaaaatttctacctgtttaagcatctctggtagacttcctgtaattgaatcgaactgtaaaacgataagtctgacataaatgaccgctatgagcactgcaattacacgccagatcgttctcgataccgaaaccaccggtatgaaccagattggtgcgcactatgaaggccacaagatcattgagattggtgccgttgaagtggtgaaccgtcgcctgacgggcaataacttccatgtttatctcaaacccgatcggctggtggatccggaagcctttggcgtacatggtattgccgatgaatttttgctcgataagcccacgtttgccgaagtagccgatgagttcatggactatatccgcggcgcggagttggtgatccataacgcagcgttcgatatcggctttatggactacgagttttcgttgcttaagcgcgatattccgaagaccaataccttctgtaaggtcaccgatagccttgcggtggcgaggaaaatgtttcctggtaagcgcaacagcctcgatgcgttatgtgcccgctacgaaatagataacagtaaacgaacgctacacggggcattactcgatgcacagatccttgcggaagtttatctggcgatgaccggtggtcaaacgtcgatggcttttgcgatggaaggagagacacagcagcaacaaggtgaagcaacaattcagcgcattgtacgtcaggcaagtaagttacgcgttgtttttgcgacagatgaagagcttgcagctcatgaagcccgtcttgatctggtggagaagaagggcggaagctgcctctggcgggcataaatacctgtaaaaggcgctaaaaatagcggcttgggcgatttttgcagcaaacgattcaaaagatgagaaaaaccgttgacgaagggtgaggcaatccgtaatattcgcctcgttcccaacggaacacaacgcggagcggtagttcagtcggttagaatacctgcctgtcacgcagggggtcgcgggttcgagtcccgtccgttccgccaaattcactcatgaaaatgagttcagagagccgcaagatttttaattttgcggtttttttgtatttgaattccaccatttctctgttcaatgattttattctggcgtaagtgcgtgattctcgcttgttgtctcattcattaaaattcaataatgatatcgaaccattcagcttaaatatatttccagagaataaatttatattgattaaatgaatgtatatttcaaattgattttgtttgttattatttaagtggggtatataattagagtccgttatcaatgctaaatattctaatcattatgacaggcgagggagtgtccaattatgaattcaaaaaagctttgttgcatatgtgtgttattctcgctgcttgcaggatgtgcctctgaatcttctattgatgaaaagaagaaaaaagctcaagtcacacaaagtaatattaataaaaacactccccagcaactgacagacaaagatttattcggtaatgaaaccactctggccgtatccgaagaggatattcaagctgcgcttgatggagatgagttccgcgttccccttaattctcctgtaatacttgttcaatccggcaaccgcgcaccggaaaccattatgcaggaggagatgcgaaaatattatactgtttccacattctctggtatcccggacaggcaaaagcctctgacttgtaacaaaaacaaagataaaaatgagaacgaggatgttgccagtgctgagaatatgaactggatgcaggcactgcgttttgtggctgcaaaaggacatcagaaagcgattattgtttaccaggatacattgcagacaggaaaatatgactctgcgctgaaatcaacagtatggtccgactataaaaatgaaaaactcaccgacgctatctccctgcgctacctggtacgtttcacgctggtggatgtggcaacaggtgagtgggctacctggtcgccggtgaattatgaatataaagtgcttccaccattgcccgacaagaatgaagccagtacgactgatatgacagagcagcaaatcatgcaacttaagcaaaagacctataaagcgatggtaaaagatttggttaaccgctatcaataataaattatatctgccgccaggaatttctggcggcaataatacaaaattctttgcatcagaaatttttcttgacaaagacagtgcaagaaaggacatggaatccggagttaaaaactgtttgttttagaatatttaattatttaactgctgaatcttccttgcgagaaatatattcattattacatttcatgccatttttaatatagattgctcctgggaaaatccccgtattattaccgcaggggtgataattagcattgacatatcctgtgacaaaaggagctattaaaggtgctattacgatagctattagtaaaaatataagagttagctgtattgttatgtctgtggcgaaattgactaccttcgtttttttgattaagaatgattttattatcgtaagtaaaattacatgaacatttaaaaaggaaaacgacatgaaaccaaagcacagaatcaacattctccaatcataaaatatttccgtggagcattttattattgaatatagaggtttaactccggtaaaaaacaaagaagcattgaatgcagggaaaaataatatggccataaaaaacatcgaaagaaactcttttaatttaacatgtaaacgcatggttaatcctcatatcacgggtggagtgttaagaacatacataaatggagtcatgttttcccttttccatttatcaagttcctgttgccgttttagtccatctctaattgcatattttaatttttctgataaatggcattgagcatcgatttcatttaaaacaactgtacacactatccctgtcagtaaaattgctcctccgacaagaattactggaaagccaaagctaacacaggcaaagaagccaggcttccaatagcggttgcaacaccaccggctataactgctttggccacatccattgaaaaatcgccaagaaaattaaccagatctcgctctgaactcataataaattctatggttctccaggctactgaaaaccagatacagaacttaactccttttattgattcagataaagctcctcgccagccaatagcgagttccagaacttgaggcgctcgtgaagagaaaatatatttaccgagcttttctaaaagccaggggctggatgttgtgatttttatatatttctctccaagtatttcaaagtaacttgcttttgtatactttaaggcattaaggttaaatataattttcccattgtcatcaaactcagtcattaatttactcgcgttaactaaccaggcgagtgtatcttttatacctgaaggatgtgtagtgataaaatgaatgtaatcaaatgatgttattgggctgagtattttttttgcaacatcaagtgtcaagagaataacatgatgagtgttctgatgccttaactcatcaatgagtgggacgtcgttaagataagggtgctgaggtactagctggtttatcggctgagcccccgaagaatgtcacccacataatcagcccactgtgcattctgtgtgttgttgttattccttaaaccagccattttatctctccgcaatagtaatttattatgttattacagtaagttactgtacacgatcctgccatttactcattgcattcgtaccggctaacgtatgctcccaggaaatatcttcataaataaaggcaattctctcctgtggttccagttctttttccaggacagcatgcggtgtgacaaaatcaatacttgatattcgggcttttgacagatttattttataataaggctggtaaatacccgctttactggttcggtagagtataaattcacatattaccattttttcattgtcactaagtgcttttgccagcaatggtgaggatttatcaaccggtttggtgataattaattcatgatgattgacattttgacttcttgagatggaatgcattaacgcataaaccatgatctgatctttatgttctggctgcgctttgtttccgacagaatcaagcgttgagcaacctgctgaaattagcccttgtgtctctccactcaaagataaataacttatatttgccatgataatctcctttaattaaataattatttttcggccgtggtaccggttgccgcctctggcatgacgttattcttcagcagcagccagcggcttaacacgccttcgagtcgctcattaatttgtttttccagcgcatctgtattctgcttctgcgcacgggcatcatggtactgcgtcaacagagactcaacgggtgtttcctgccccagtccccgctccgcctgccagatgacatttttgatataggaaagggttagtccctctttctcgcgctgcatcactagatctgcaaaagcatgtaagtcctggcgggtctgcaaccagccacgcaactgcgggctactctgtgcgcgggttttgagtgcctcattccattgtgtcgaggcctgttgctgttgcaggctttccggccagcgactgtcggcaacacgcatcatctgcatcccggtttccagcggctgtaccggggaggtatcaagaagttgttgcagcctgcgctcatagttttcgagttcaggtgaggccatccacaccgttgctgcgccctgagcggtgtcgttaacctgtaacagttgctgctgcaccggatagacctgccaccaccacaatgctgaggcgacagccactgaacaggcgatccctgcgataaaccctcttaccgtactgccttgctttatcacactggcctgtgggggattctctgtcagactgcgcacttccactttcatctcaggcaggccgggcaggggaggcactaccgcttctggtgtggaagatgcctgtgtttccggggcataaatcagcgttctgaccgtggtctgtgcggcgttctcagtgttactcttcagctggggttcaagccgtttacgcgtgttctgcataaaatagagcagattctccacgcgcggaacgcgcttcagttccacctgctggagcttatcgcagataagctgcaatgcccgctctgtgcggtagatcagtggtaggtcggattccgcaaaggagatttgctgacgcagaatattgccggttcgggagttaaaccagtccagcatttcagtacgcgccgggccgccctgcggccagaacttatcccagtcgtggcttaccattgccgccagcagttccgcaccttcgcagaatcccgccagtccctgtgtccgtgtccgggcaagcgtatagtaggtggcggtgtgtaaatccacaccgttggctttaaaaatcgccagcgccagcgactccaccagtttccagttcagctcaggctgtgacgggtggctggctttgtttatttcctcgcggatggcgctgaattccggcagcccgcgcgggtcactgccggtaacgatagtttgtgtcagtacgttactattcatccctgcctcctcagtacagtgtgtctgacagaccaaactggctgaacaacccaccgctgaacgggttatcttccgtgtcggtatgcacacggtaggtcatcgcgccaccgtccacgctaaagcgcacggtaaagttgccatcctgtactccggtcagttgtccggccccgaacaggcggaactgcgcccacggcccgctgaagctgatactgcgcggcgcgttgccgctggtgccgatgagcgtcagcttactttcgttgccttcgcgcatgttgttaggccagaccagatgggcggtatagttacggccctggctgtaatcgactaactgaccgtcaaggttcagtacactgcggcgtttattgcctgaaagcgataccgtttccacggcaaaggatgttcccagaccgttctgtttgctgaagaagatgtcacggattttctgcgcagtttccagttgcgcaataatatcttcgcgaataatgacgttgttatcgccatcctccagactcaggtcattatcgataaacagcttcaggttctgctggtagaaggtatccagtatgccatccggtttaaagaagcgttcgaaggcatccagtgaggcatcctgtgcagaacgcggattaaacggatagttatttgccagttgctcgttaaacggtttcaccacgctgtcgcgccagtccacttccatataatgaacagcctccaccatcaccacatgccaggcctggtcagccagcctgccaacccagcggttgagcggagcaggcagcgtttttgccatctggcgggtggcgaatatcggatcgctgctgttctgatcaagccgtaactgcacggctttcagcgccgatttccctggtacaggcgcgttctggattgccagcaggtagcggtgcaactcggtgagttgctgatacacggcctgcatcgtgctttctttgtctttctgtactgccagggtactgttttccggggcgaattcatgcccgaggcgggtgagtaactggtaatccggctctgccagggcttcctcccgttctttggcagagagtttttcagaaaagacgcctggctgtgtgttgtcacgcagcacggtcagcgcccgctgcaaaggctggtcgccgctgataacctgctccagcgccccggtcagttgtccgatggactcaaaattgcggatattcagattgtccatcccggcccgccaggtggcggtgtagtcgctgatatactgctcggtcaactggcgctggatttccgcgcggtcggcgtcactgtatttcacattgcgggtgaggttaagtacccaggaatccatcgccgtcagttcaaccagttcatcgcgctgttttacaaaatagctttgcaggccgtaacgggtaagaaactgtggaacaaccagtttgttgtcatcggcagatgtaaacacctggtcaaaggttggccctacctggtcacgcagattgaggtcggcaggaagaacgcccagcgcccgcgttttcaggctctggtaaacccgctggtagacaggcagtttgctcagttctttctgtgctgataccacgggcttgtcatatggcgtccagcggctgatggcgtcaccgtcgcccgcctgacgctctgcatgccagtcagtatgagccagcgcgtagtcaagatgggacatcagttgtgcctggatatcgcgctggccgtggaatttttcgctccagcgttttgccatatactgcttcaccacctgattgttacgtccgcttttgtcctccagcattcgcatcacgcgcagcaccgcgagtttttcttcactctccggcggcgcggcgttcatcgctttgaccagcccgttaaacagcgagggcaggtaacgttgctccagcagttgcagataggtctgttccacataaggcccgatacgtcgtccctggtacagtcccatatcggccagacggctgcggtcgccccagtcgccataggccagtgtggcatcgcgtaccgggttcaggagcggcagttgcaggttgccaaagtcatcttccccctgcggaggcggcacgtccataaaggctttggcctgcttaagcacggtgatgccggactgatagttaccgttgtaatagtgatgccagccggtgatgagcagcagtgctgccacgccgcctgtggcagagaaaaccgtcaggcggcgacgggaacgtatcagccaggcgcggctctctgttgccagattaggctctgcgagtaatgcctgcgggaacaggctgcgggtgaaataaggcgcggtgtccaccaggggccaggacgccagtgggttattgcccagccggtactggcgggcggcagactgggtgaatatatcatccatctgtccacgctgaagcgaagaggtgagatagacaccacgcagcatcacgttcatattttcgccatcaagcagaccctcaagcagtgacaccagcggttcacggcttccctgcatctggcgggaaaaactgaataaagacgcgcgggtgtgagtctgagcgaccatcagatccggcaacgccagattcattcgatccacccatgtctgccagaaagcattcaactctgttcgccagtcatcattttcatgggcacggcgggtgaacgtgacgcccagaatcgcatcgcgatcctgtctgttgagtgactggaacagggcggcaaaaccctgtaataaatcaagccgggtcagtaccacgtaaaccggtaactggcagtgaagatgctggcgtatatcctgtaagcggctgcgcagcgtctgtaacagatgctcgcggcggcgtttgtctgcggtcagcagatcgggtaaatcgagtgtcagaataatcccgttcagcggctggcgcgcgcgcttttctttcagccagccgagggcatgttcccacagacggcgatgcaggatatccgcatcagcgggagcgcagagtgtgccgtcgatatcaaagatcaccgcctgtttaccgacatggggcgtgaggtacaggcgttgttctgcgccgcgtgcgccctccggggcataaataatgtcggacggaaacccctcgcgcagcagtgtcgttttgccactgcccgccgggccgatgaccatataccacggcaactgccacaggaaacggcggttgtcgagatggcgttgcaggcgcagcagccagcggtcaagataacgctgctgggcgttcagttccacgctgagcggatcaacggcttcctcgcgctgttgcttttgcattttttcaagctgttgcaggcgcttcatcacccggacggtaagccacaccagggcaataatcccccacgccgccgttgccagccagcggttcgccagtggtttgagccactgctcttcatacagcgtccacgtcgggcctttccaccagatccaaaccagcaggaaaatccacgccagtatcagcagccagaatgcagagactttaaatcggggcatcgccgggcgcagggctgatttgagtccgctgaatagtcggggtgttggtaatctgaacacaaaaactcctgttctcttttattgttctgccgtgaatttttgttctagctgctcaagcagggacggctcccagtctgccaccatcatctgcaatcccatcctgaacaacatcctgtactgctgttgcgcaagctgtaccagccccgcctcttccataagctgcgcgccaaaatactgccggtggaactggtcgcggggttcaccggcgggtaacgtatccagataccgtaaggcggcttccagcccctgctcatcaaaacacaaccgcgcagcctgaatatcttcattactcacctgtatgactggcgcggactggttacctggctgatttgcaagccattgcttcgttttttcagaaacaaacggtgtgtggtcgttaaacagaagatcagcgagcgcgggcagacggccaagaaaggaaacgacttcatcgcggatggcatcggctacagcggtataaccaagacggtgcgccgtctgtgcagaaatgtagtgaccgtccagccagtagggtgccagcagtacgcttttttccacctgctgccacagctccatatccgcgctggcaagccgggactggtaatccgccaccatatcggcagagaccgcagccagtggagtacgtctatcgcttttcgcctggggcgtactggtgatggttagccacagggcatggcgacgcaggcgatagccctgcggcgattccggttggcgctcgcataaaatggccgccacttttaacagtgtgtcgcgccaggttttgtcgtcgtgactgtcgatggcgatctgtggagtcggagtactggtatgcgtcacgccgctttcagacgtggcgatcgtctgtggtgaactactggaggccgccggagtgggggctggagccggtgccgcacgattaaacgcacgctggtaaagggcaaaaagatcatcagtagcctgtgctagttccggggcattatgtgactgccagcattgcgccagtttcgccagttcacctagcagcgcatcgcgctgcgctgtggcggcgttctgtgaaaaagcgtcaatacctgtttcgaagcgtttaataacctggctggcaaagcgttttttatgtgccatattctgcggcgcggctaccgcccagtaatgctccacatacagcgccagcaggcgcaaggccaggagcggatcaccggcatgttgcagggttctcagcagatgcgccagcaggcgaaaatccttactctccgaagccagaaggaccagtccccggtgctggagttcagggatatccagctggctgtgcgccagcgatcccagtttgacaatcccaccgtcgatatactcccagtccgggttgtcgtccttcagcgccgatgccagtttctcttccggcaggttttccagcaggtgcgatacccagacattcggatcgcgtaagtccattgccatatttttattctcccgcccagtggcaggcatcgcgcaggggagcaatcgcccttgccagcccgtcaatgttaaaggtcagctttccggcggcgttgtctgcgccggtatccaccatcagcgtttttgcgccgaacagttgcttaatttcatcaatcccggacagccccggctggattccagcagagtgccgttctcgcgcacaaaccagtggctgcgcaatgcccggctgtcggcattcagggtgacggcgatatcatgaacatccagagggtgcatcagcgccacctgcatccgggtgatattgtccacgcaactgaacatcagcaccgggcgcggcggaacatggccgatagccggggtggttatcaccaccgtcgggcgttcccccggcacctgcgtcaccagcagctctgtggtgttgccctggcggcgtttttcctgctccgtagcgcgggtccaggcttcgcccacaaagctggctttgaccagtgccccgttaaatcctgacggggacagtggtgccagcaggcggtcgtaacagtcaagccgctccagcgccgccgtctcctgccgacaggactgcatggcatgtaacgtggcagtcgcatccggcggggtcgcagtggcgacggctacctccacaccggccagtgacgatgtttctgcgggcgcggcactggcgggtaagcccgccaccaggcctgcgataaaccatcctgtctgccggaaaacgcgcaacctgctcataaatccgtttcatcctctgtgacagactcgtcgtccagagcatcttccacgtctgccgtgaacgcgccgtctgccgccgacaggcggatgcgggcaatcgccgtgttggccgccattttctgcaacagcagcagcgagagcgggggcagcatgtcgccgtcaatgacggactccagcatccttgcgccgttttccgcgcgggtgacgcggctcatgatctcgtccgtcacttccgactcaataatcacgtccgcatcaaagcggctgcgcagcacgttatccaggcgggccagtttcccgtcgataatggtggtgagcgtctctttcgacagaggcaggtacggcaccacttccatacgcgccagcagggctggtttaaagaagtccgccagcaccggatacagcacttcctgcatggtttccgggtcatccgcgtgttcaacaatcacctggtaaccaaggttggaggtgaggaagaaaacgatattcttacagtcaatcagtcggccttcgccgtctgccatctcgcccttgtcgaacgcctggtagaacaggttgaggacatccgggtgcgctttttccacttcatcaagcagcaccaccgagtacggtttctggcgaatcgcttcggtcagtacgccgccttcgccatagccgacatagcccggaggggagccaatcagccgcgagacggtgtgtttttcctggaactcggacatattgatggtggtcaggtactggcgaccgccgtagagcagttctgccagttgcaggacggtttcggttttacccacgccgctgggaccggccagcagaaacgcgccgagtgggcgtcccggacgacgcaggtcggcgcgtgcagtcagcaggtgtttatgcaggctggcaatcgccaggtcctggcctttgatggtgtcacccagccataccggcaggtcggtgatgaccgacatctcattctgtgacaggcggttaagcggtacgccggtccattcggcaatcaccgccgcaatctgttttttatcgacgtgcggggagaccagcaaccggtcgttatgcagggcgtccagttcggcagtgagctgtgccagtcgctgcaccggggaaactgtttctgcggtctcttccggctgttcgctgccagcttcatcagccagtttagcaccggtattatcctgttctgactctggctgcgtatcctccacggtatctgcgtccggcaacggcgccgcatcgtcctctgccacgcccagtaactgctggcgcagcgcaataatctcccggaccagcgtctgctgctggtgccaggccgcttccagttcatccagcgccgtcagcgtttcatcatactgcaccagcacctcggtcatccgtgatgtgtcggtacgcagtccgatgcgaagctcgcgctcaagctggcgaatttccgcctcctgctggtggctcagagtggtcagcgccgagatttgcttcggcggcgacgacaggttgatggccacacgggcgcaggcggtatccagcacatcaatcgctttgtccggtaactgacgcccggagagataacgctcgcttaatgtcgcagcggcctgcaaggcgtcatcatcaatcagcacgccgtgagactgttcatagaccgccgacagaccgcgcagaataatggtggcttcggcagcgttgggttcgctgaccttcaccaactggaagcggcgcgacagggcggcatctttttcgaagtattttttgtactcgctccaggtggtggcggcgatggttttcagctcgccgcgcgccagcgccggtttgagcaggttggagatatccagcccgccctgctggttgcccgcgccaatcagggtatgtgcttcgtcgataaacagaatgaccggcaccggggaggaaatgacctccgccatcagccctttgaaacgtttttcgaattcacccttcaccgacgccccggcctgcaatgcgcccaagtcaagggtcatgatatcggtgtttttcagcttgtccggcacctggcctgccacgatgcgcagcgccagcccttcaatcagtgcgcttttgcccacgcccgcttcgcccaccaccaccgggttgtttttacggcggcggcagagaatgtcgatcatcaggtcgatttcgtggtcgcggcacagtaccgggtcaagcctgccgttacgggcgtctgcggtcatgtttttggcatagcgggcaagcagggtgtcagaggcgtccgtcattgtgcctgcgcctttaccgtctgcatccggcacgactgattccgccgactcctgtgtccactgcacaaagtcctgttgcagacggtcacggttaatgccggtcaacagccgggcggcagcaggcggtatataacgcagcggcgaatgcagcagggccagcagcaacacgccgccgcgcagttcgctgtgctgcatctcagccgacgccagcagccagccctctttaagccactcaaccagcatcggggaaaacgccgggtagctgtccgcagaacgggcggttgtgtagttctctaccgtcagcgcctggcgcaactcttccatgccaatatcgccctggcgggtaataacccgcaggtcactgcgtggcatggcgagcatctgaatgagcacatggctgacggtaatttccgctgcctgctgactcatacattcagaggcggccatctccagcgcctggcgggagaacaggttcagccgttttaccagcgtgggaagatcaatctggatcataaacgtccttatcgaagtaatttgtttagctggtgcaggatgtcctgcgtctggctgtccagccgcaacagatagaacaggtaaaacaacgccagcacgacaacgccaccacaaaaaatatgtttaacagtcaggcgactgatgagctgataacgcccgccctgggtttttttgtcctggtgtaacagcgggaaaggggcatcgccgcgcagtttatgctgaacgtggtacagacggcggtagatctgctcaaattccccctgatcctgtgctgccactttgtagcgcccgcgaaatcccagagaaaaacagatccagagaaattccagcagatcctggtaacgtttgggttcacggatcaggcgctccagcaggatgaaaactttctctccaccccaggcttcgttgtggaaatggaccagcaatgactgcttgatccactcgttcttgtttgaccagccgttaccgagcgccgcttcatcaataaacgtgcagaggatgtagcgaaacgagataatcacgcccggttcgtagccctgctcctgaagcagttgctccacggcctgaacatccgtcaccacctgagcaaaaagatgctccggcatcgtctggctgttcatggttgaaaggcgcattaccataccgagtagcggcgtggccgcgtcgatcatcggattcaggctgttgccacgaagcgcgagatggtagttgcgctggcttttttcgtcgtatccggtaaatggtggcagagacagtgacccctcatccatcgtcttaccctcttatcgcccacagttgcatgttcagatccgggaaactgccggatacatgcagtgcaacggccccggcggcagccatttctgtccaggcctgtccgctcttgtcgagttcgaaatagctgaacccggaatggtaaggaagctggcggggagccaccatcagtgcgcgcaatggaatgccggggatctgcacactgaccatattgcggattttttccggcgaggaaattttcgactgctggataaactggcgctggatctgatcgaccggcatgtttgccgccacggccagcacaaaggtggcagattgcagcagttctgtgtcatggatatcggcctgccagataccgtcacgcagatgcagcggcagattgacggctcttggcgacagtacggtatgcagcgcccgtttgacttccggtaacagcgttttaaatgttttggtcaggtcatgatgatcatacacatcaagcgggcagggcaggcgcgacggctcggtaaaggtcatcagttcacccagcaacccggcaagatcaaggtagaaatcttccgggtggagctgggatcgacgggcgtgatgggtaaaccgggtctggttacggttaagtaactgcaacatcataaattccgccacatccgcgatgccgctctgcgccggagagccaatgcggtttgccagatcgcttgcccgtccgccaatggccccctgtacctctttgagataaacacgcagtttcttactgacctgaatattctggcaggaggggataaaatcgtcatccagcgtcagggagccgtcggcatggcgatcgctgatacggcaaagcgggagcgtaatataggcgctcatatcttctgcaccgctcataatgcgcggcgtcagttgtcccagcgtcagtgttcgcgtgtcaccttcttctgaatgcaaatcccggacatcggcataattcagccggtaacgcccgattcgccgcccgtcgctgatttcatttctcacatcactggcgaccggcagagcgaggtagatattgcggcttctctcgtccggaaaatgttgcgggtgcagcggatcgggcagtgcgtcctggtcggggatagaaaagacggtgccgtcgggcagtgtgcctgacgcgctgtcaatcatgatcttaccctgtgccagcagttcattgttgagagtgagttcggtaaatccccaggataaatcattcatggcccggaaacgctggttatccaggtagtcgttgtaacgctgctgctgctggaaatggtgtggacgcatcagcatcccttcctgccacatcaccttgttgcgggtggttgccataattattcatcctcttttttcatttcgatgctgctttgacgtacatgcaccagcaggcggtaatggtggccggttccttccaccgtctcgatttgtttccattcagtggcctggtcatcggagaaataggccacgacaccaataaactgcgttttctcatccagctttaccggcggcagggttttgatggtgtccggcaacaggttgaaatcctggtggtcgatatagtttttacccagcacatccggtagcggcgtactggctatctggtcatagtcggctgccagcaattttgagtcgtcagtcaggtacaccagttgcacatccacggcggctgattcaccttccgcattggtattggtgtccggttcggtcagcagggtgacggttatttccgaaggttgctccttcaggctcccgacctggatatccgggtttttgatcacctcactgatttttttcgccgtttcgcagccggttaatatgacgcacatcagcacgcaggccagaaacgccttcctgttcatgcttccggctcccgctgtttttcacgaagcacccggtcatagacctgggcgtagacctcgttaaacagcatctcaaacccctgctggcgatcggaggccagttcttcgtaataatggctgtacatttgccatgctccggcatcatccagcggctggcgcagttcatggctgcggcggtactgcacaaagcggcgcagcagattttgtggtgagaaagcatccagcaggacacgaagcgactccacaatcgctgcccggttagcttcttcgtggtggcggacattgcgcaggctttcactgacggcggcgggagccgccaaatgtaccgggcttttaccttcggcaaacattacgtcgagcgcggtggcgtaatccatgttcaggcgcagcgggttatcttccagcgggcgcaaatgtttgtctgagaggctgttacgctgctgctgcaaatcgagcagaccttttattgcggcctgtaacgttcgtccggcctcctccagaaaatcatccgcatcgtcggaattgctcatggtaagcgagccgccaagaccgcgcagtaagggggtgaccgcaaggtggcgttgcgccatttctgccgcagagacgtcgtcattacgatcgccggggctggcataaatgggcggcagatccataaacggagtattgatccccccattacttgccggatcggacagcggtgccgatggccggacagccgcaatgcctgaaagcggatcgcccgtggtaatcaggctttcggactgaagtgcctggagtggatcggcagaaaaaccgtttaccacggtgtctgcaagttggtgccggtgagtcattcccggatagtgtggcgtaccctccgttgatagcagggtatccgtgagcatatcgcgattggtaacgatggtttcgggagtggccatttcctcatcgtaatggggaatatctccccggttcagatgaaccctcaccatcagccgtccgatctggatctcatcgccctggcgcaactgtattaggtctgatgttgctgtgacttttgcctgattcagccacagttgtgccgtctgcgggcgcagacaaaatgtgccatcgtgcaggataacggtaaaagcctgggccggaatgctctgctgacgatcctgtaccgaccagtggcattcggggccatggccgacatttccctgctgtgtgaacagacagcgcgccgcccgtccgctttccagctcactgccgttaatgacctgcaatgaaagcgtctgtagtttctcttccggcatattctgctccgtgattatcataatttacgaccgtaccctgatggtgactgagggtcgttcttccggtgtgccgaggaagctggtccagcccagcagcgcacttttgttatcgcccaggcgcattgcgcccacctgctccggcgccagccccagatgtaagtcccaggcaagctgatcgcgcaggatgaaggacacgaacatcgtcagtggcaggaagttttcgccggacggcagaaaagagaggaactgttttcgggtcaggctggtaatactgagctggaattttccgctgagatcgggcactcgtgtacccagaacaaagttgcccagtaccgatcttcccgccagtttttcgccatttttaagagaatagctccccagactattttgctgatccggttcaatatccaccttgcgacgttgccagttttgcagcgtcacttctgacaaatcaaagcagtgggacaccaggccacagattatttccggggatcgtcccggatttgccaggataccggaatacgccagcattttgctgtgattaatcgccagcttatcgcgaagctggcggtggcccagcccgacaagggagtacatgcgctgcgagaacgcatccacaccgccgttacgaaaactgatgtgatagcggtacttacgccagatatgccagacaaactgggtcaggcggtggctgaacatatccagaaaatcacctaccggactttgttcatgtaccgctttccaggccaggtgatcgaggtaataaccggggagaggcgactggctcccctgtaaccccataaaggtggtggtcatcctgaatgcccctgatgtatcccgtttcagcgcactgatatcactgcacgggaaggcaaggctggcatcggcgctgaaacgcagggtttcctgtgccggatcgtcacgcagggataattctggcgtccccttttcaccctttgccaggcggtgcaacagctccgccatcgcaaaaaaattgtaagagcaggcattatggaaaacctgtgccagcggatcattctgctctttatctgccgggggatttcccggactcagataagaggatgctgcccgattctttccgtccatttccatgtctcctggctttctgtgttcacaacggtcagcatgtggaatgagttaacgctggcgtacagcgacagaaaatgcgaaagcaccgtaccgagcagatacatttccccttcacagacaaacggctccgggtgcagatacagcgtggaggccagtccccggacgggaatacccgtaaacaggcgatcaacggggcgggtctccagacgctcaatggcatccagcttttgttgtgacagccgtgccgtctgcggatgatggattgcgtggcgatcaaagttggcgatgacctgcttcagcgcgtccgtatccagtaatgacagataattcaggttcatggcggagagtagggaccagtgcaggctgccatcaatgaccggccagagtggttgcgtcgggcgggtaatgttgcgaaatgaagcaacagctgcatttttaccggttgtgccggtgatatcgccggaacgaatttgtgacggaagctcacggttggtacaggtcagcgataccgaaaccacttcattactgagcagagattcgtctgacggataactgccatcagcatgtataaaggcaagggtatgatcaaagccgctatggaacagggatgttttggtccggtgatgccagtacaccacttcccgcttccggctgtattccatctgatggctgaaactttcaaaggctggccactggcgcgcggcctgcgtcgaaacaggacgccccagatcttttttcctgaacatatcctggacctggctcaccacactgttaacggaaaatacatcgtaatgttgtgggtaatggcggctgggaaccagcggatagtctgcccgccggttgtccagcgtgatggcttctgcatggtggataaataaattaatggcaggtgcgcaatacaggcgcagggaatcgcggcgcagccggatgtccacgggcaaagggcgcgaaaaacgcagttgcagggtaaagaattccgcctgcaatccgtcaggcaaagccggacaaccacaaagatcaaaaaagagaaacgcatcggggtaacagaaatactcctgaaggatccggtagccgctgtggacgtttttcggccagggcagcatggcatcctgcggctcaaaaccgacagcttttagcataaactcaggcaggcgaagatgctgttcacccacagtcaggtcggcaccctgcaagtattcgcagaaccataaataaagctggtcacgggtatagttgtcgtcattgccgagccagaagcgaagtttgttcagatccagcgtgcggaagtccgttcccggtgcgaccgaaaaggtgatgttgataacaccattacgggtcgtactgcggttttcaatctgctccaggcgaacgggcagcagccagatatcccggcagagggtgaaggtacagggaggcggctcctcctttttagcatcagagggcagcacttcatcaactctgatttccccggcgttggttgtaaactgctcattacgggggattaacaccggtacagaagacttatccatatccggcgtatattcaataagggtcattgccggaaccggacgcaggtaattaggccatagcatcttaataagcccgtgcgtcagttctgggaattcatcctcaattttctggcggagattgccggtaagaaaagccaccccttccagcaggcgttcaatatccggatccgcatctttttcggccaggaagcgggccagatggggtttttccgttgccagcagcttgctaagctggcgcaggtaatcgagttcttcccggaaatagcgttcttcaaattccatttgtcagtccacccggtaatgctggctgccattcggtgccatatcaaattcaagcacctcatgcgtttcgttaaatgtcacccaggctgtaatatgaaacgtcatatccagcgggctggaggcggatgaaaccactgcctgcacttcagcgtgtgagatccggggttcatagcgttctatacattgctcgatggcccgactcatggattcgcggaagttttcagccccttccggttcatcaatgcccagctcaggcgcaccccggcaactaccggaccgggtattaagaatgtttcgtaggttctggcgaatggattgcctgagcgaataaatactgcctccctgccggtttctggccgaagaggcttccatacgctcaaaaagagaacctgtggttctttcccgatccggtatcatggtgtgttactccctgtctaaccggccaaccagggaaagctcaaaatttgcccccataaatttaaaatgaggtctcacgcttagcgcaacctggtaccagccgggttcgccttctacatccataacctcaactttggcagcgcgcagaggtttgcggctgcgcacgtctgcaggcgggttttcctggtcggcaacatactgacggatccaggtattaagctctctttctaagtcgctcctttctttccatgaccccagttgttcacgctgcaacaccttgatgtagtgcgctaaccgattgatgatgaagagataaggaagctgcgtacccagcttatagttggtttctgcatcttttcccggaaagtgcttcggtttttgtaccgagtttgcagagaaaaaggctgcattatcagagtctttacgcatggtaagggtgataaaaccctcttcagccagttcaaattcgcggcgatcggtgaccagcacctcggttgggattttggcctgaatctgcccatcgtttcgaacagatgcaccggcagatctttcactgcgccgccgctttgcggaccgataatgtttggacaccagcggtatttggcaaaactgtctgcgatattgcatgccagcatccaggccgtattaccccacagataatcttcgtggttctggctgacatcttcgtaatagttaaagttcttaacagggttatctgttggtgaatagggctggcgaagcaggaagcggggtgccgtaagccctaaatagcgcgaatcttccgagtcacgcagggcgcgccatttggtgtaggccggaccttcaaagatggcataaagatctttgatattaggcagttcggtccacgagttcagccccataaactccggggaaacggaggacaggaacggtgcgtgcgccattgcgcccacggcactgacgtattgcagcagtttcatgtcaggcgcggtatttttgaactcataagcgcccagcacggcagcgatgggttcaccgccaaactgtccgaaaccggacgaataaacgtgcttataaaatccggactgaataatttctggcgcaaactcaaagtcttccagaagttcctgcttggtgacatgaagcacgttgaccttgatgttttcacggaaatcaacgcgatccaccatggttttcagtgagcgccagaacgactcgacctgctgaaaggcaggcgcatggatgatgacatccatctggcggctgatgcgttcatcaatatctgcaatcatgctgtccacggccagtttattgaccggttcggcagatgcagtggattgcaggatgctggcaataaaggctgtcacaccctggcgggcaacgtcataaccttccgaaccgggctgaatacgggtctgtgccatgatttgatcaagcagcgacgatgcctgctcaggctgcccggcatgactggatacgagttcctcttcctgtaaagacatactgaaaatccttctgttttagctgtgtttctgaaaccggcttttcgccgtcagtgaagtacgcgctgccagtgcgacgcgctctgctgaaactcacaaaaatggataatctcatccaatagatcactgatacggcgatccagtgttgtaatcagcgcagccacaccatcctggttgatttcaacggacgggctgaaacatacctggtaaaccacctgcagaatgtctgcaacagagaggtggtatgtcccggagatatttttgtgtgccgtcatgcctggataaccctgtttaatgaaatagtggtggttatttattgctcaccagaccgatttctttgagcaactgctcgcgggactcttcattttccagcaatgcctggagctgggtacggaatgccggaaggttacccatcggccccttcagtgcagtcagtgcttcacgcagttccagcaatttattcacttccggaacctgccgggccacgctatctggtgaaaaatcatccagtgatttgatattcagcgccacattcagttcatcgtctgttgtgcttcccttcagcgtggcggggacagtaaaattgaggccaatggctgcttcagccatcactgcaccgaaattgtgcttgttaacggaaactgcctgacgttcatccagtggggatgtttcctgcgtatttccggtatcgccgacaacgagcatgttaagcggaagttccacttcagccgtctggccatctgtttttgggacatacgatatattaatacgctcgcgaggcgcgacgctgccttcaaattttttgctcataaaagtgatccgtcatgttatctcgtacaggccatgaacacggcatatttgtaccgcaaaaaaatatcggcaatgccgccctaatggcggtgaaaataaaatcaccactccttcatcaccccgcattttacgcttcaaaataaataagaaaaggactttttatcgatcgtaaagaggggtattctgcaagcgttaaatagattgtgtgaacctgtgcaattcgcgtcaggtgtattatggcaataatttaaatatagattttttatgtaacttattgaagtatataataatttcattaaacatnagctaatctaatgattgcttattnatatatttgtttngtgattgattaagtgggtattttnaaggaatatctcaaaaattatcaaaatgataattcagaaaggataaatacaatatttattcatgattcagctttggccattttatggaggcaatacggactttgaacagttgggtatggttatccagatatatattattaagttattgctgaataagagatttaatgattttaaaaatagtttttacgacaaccgtaaattctagctcggtttgtatgtaaaaaatactgaaaaatgatgcggttccgtgaagtgagctgcatctgcctgtctgggattaacggcaggtcattgtaagtagtaattaaccacgttaacaaggagtttacaaatgccaacaccgtgttatatctccatcactggtcagacccagggaaatattactgcaggtgcatttaccgctgattctgtcggcaacatctatgtgcaggggcacgaagacgagatgctggtgcaggaattcctgcataacgttactgtcccgaccgatcctcagtccggtcagcctgcgggtcagcgtgctcacaagcctttcatttttaccgtggcgctgaacaaagcggttccgctgatgtacaacgcactggcctccggcgaaatgctgccaaccactgaacttcactggtggcgtacctctgtggaaggcaaacaggagcattatttcactacccgcctgactgattcgacgattgtcgatatgaaactgcatatgccgcattgccaggacccggcgaaacgcgagttcacccagttgctcgaagtttcactggcctaccgcaaaattgaatgggaacacgtcaaatctggcacctccggtgccgacgactggcgcgcaccgctggaagcataagttaagccaacagcatccggctatcaggccggatgctgtttttgtattacgccgtagaaagaaaggttgtcagtaaggggttacgttcacgggagatggcggctgccggaaacttcggcggtagcgtgcctgaacgcaagcgtaacactgtactgtcacagccgctttaacagcgaactgtctgtttttccttaaccccggaggttgctatgtcaaccggattacgtttcacgctggaagtggacggcctgccaccggatgcttttgcggtggtctcctttcatctgaaccagtcactctcttcgcttttttccctcgatctctctctggtcagccagcagtttctctcccttgaattccagcagatcctcgacaaaatggcctacctgacgatatggcagggcgatgacgtacagcgccgggtgaaaggtatggtgacctggtttgaactgggggagaacgacaaaaaccagatgctgtacagcatgaaggtgtgcccaccgctgtggcgcacagggctgcgccagaacttccgtatcttccagaatgaggacatcgaaagcatcctcggcacgatattgcaggaaaacggggtgaccgagtggagcccgctgttcagcgagccacatccttcccgtgagttttgtgtccagtacggtgagactgattacgatttcctgtgccggatggcggcggaggaaggcatcttcttttatgaggagcacgcgcaaaaaagtaccgaccagagcctggtcctgtgcgataccgtgcgttatctgccggagtcctttgagatcccctggaatccgaacacccgtaccgaggtgagcaccctctgcatcagccagtttcgctacagcgcacaaatccgcccttcttccgtggtgaccaaagactacacctttaaacgccccggctgggccggacgttttgatcaggaaggccagcaccaggattaccagcgcacacagtatgaagtgtatgactaccccggacgtttcaagggggcccacgggcagaactttgcccgctggcagatggacggctggcgaaacaatgcagaaaccgcgcggggaatgagtcgctcgccggagatatggccgggacgrcgaattgtgctgacggggcatccgcaggcgaacctgaaccgggaatggcaggtggtggcaagtgaactgcacggcgaacagccacaggcggtgccaggacggcagggagcggggacggcgctggagaaccattttgcggtgatcccggcagacagaacatggcgaccacagccgttgctgaaaccgctggtggacggcccgcagagcgccgtcgtgacgggaccggcaggcgaggaaatcttctgtgatgaacatggccgcgtgcgggtgaaatttaactgggaccgttataacccgtcaaaccaggacagttcatgctggatccgtgtggcacaggcgtgggcaggcaccggattcggtaacctggcgataccgcgtgtgggtcaggaggtgattgtggacttcctcaacggcgatccggaccagccgatcattatggggcgcacctaccaccaggaaaaccgcacacccggcagcctgccgggaacaaagacgcagatgaccattcgttcgaaaacctataagggcagcgggtttaatgaactgaagtttgacgatgcgacagggaaagaacaggtctacatccacgcgcagaagaacatgaacaccgaggtgctgaataaccgcaccactgatgtgataaacaaccatgccgaaaaaataggtaacaaccaggcgatcaccgttaccaataaccagatccagaacattggcgttaatcagatacagacggttggtgtcaaccaggtggaaacggtgggcagtaaccagattatcaaagtgggatcaaaccaggttgaaaaggtggggatcattcgtgcgctgacggtgggtgtagcttaccagacgacggtaggcggcattatgaatacctcggtggcgttgttgcagtcctcacaggtagggctgcataaatcactgatggtgggaatgggctacagcgtcaatgtggggaataacgtcaccttctcggtgggcaagacgatgaaggaaaacaccggacaaacagcagtttattctgccggtgagcatcttgaactctgctgtggtaaggcaaggctggtgctgacgaaggacggaagcatatttctcaacggtacgcacattcatctggaaggggagtcggatgtgaacggtgatgcgccagtgattaactggaactgtggtgccacacaacctgtaccggatgcgcctgtgccgaaagatttaccccccggaatgccggatatgcggcaattttgagtcaggtgcaaaaaattaaaacggaactggtgcagtgaccagatgaaccatattaaaagcagaaggaattgatttatgggcggcggaaaaccggcggcgcggcagggtgacatgacccgcaagggactggatattgtgcagggttcagcaggggtgctgataggtgcgccaaccggtgtggcctgctcggtgtgtcccacaaaaaaggacagtccgaactatggcagcccggtgaacccgctactcggtgcgaaggttctgcctgttgaaaccgacctggcactgcccggcccgctgccgtttattcttttccgcgcctacagcagctaccggaccaggacgcccgcgccagtgggcgtgtttggtcccggctggaaagcgcccttcgatatccgcttacagatacgcgatgaaggcctgatactcaacgacagcggtggtaggagcattcactttgagccgttgtttcccggcgagataagctacagccgcagcgagtcgttctggctggcaaggggcggagtgctgaaacaacacaaaggccatccgcttgcgcggctctggcgggcgttgccggaagcggtccgtctgagtccacacacctatatgatggctgtcagcacaaccgggcagtggctgatactcggctggccggagcgtgtgccggaggcggacgaggtgccgccgccggagccgcccgcataccgggtgctgacgggcgtggtggacggcttcgggcgctcactgattttccaccgcgaggccgcaggcgagctggctggcgaaatcaccggggtgacggacggcgcgggccgccgttttcacctggcactgagcacacaggcgcagcgggcggaagccttccgtaaacagcgcgtcacgtctttatcctcccctgccggtccccgttctgtttcctcttctcaggttttccccgacacgctgcccgccggtacagagtacggtgccgataacggtatccggctggaggcggtgtggctgacacacgacccggcctacccggatgaacagccgactgcgccgctggcgcgctacacgtacacggccagcggagaactgcgggcggtgtatgaccgcagcgggacgcaggttcgcgggtttacttatgatgcggagcacgccgggcggatggtggcacaccattatgcggggaggccggagagccgctaccggtatgatgataccggtcgggtgacggagcaggtcaacccggaggggctggactaccgctttgagtacggagagagccgggtaatcatcacggacagcctgaaccggcgggaggtgctgtacacggaaggcgagggtggcctgaagcgggtggtgaagaaggagcatgccgacgggagcatcacccgcagcgagtatgatgaggcggggaggctgaaggcgcagacggatgcggcggggcggcggacggagtaccggctgcatatggcgtctggaaagctgacttcagtgatactgccggacggcaggacggtgcggtatggctataacagccagttgcaactgacttcagtgacatatccggatggtttacgcagcagccggaaatatgaccgtcagggccgactggcagaagagatctcgcgcaacggtaacattacgcgctggttttatgattcttcccgcagtggcctgccctgtgcggtggaagacggaaccggggtgaggcggagaataacgcgaaaccggtacggtcagcttcaggcctttacggactgctcggggtacgcgacgcggtatgaatatgaccggtacggtcaacaaatcgccattcaccgggaagaaggcatcagcacttacagcagttataatccgcgtggccaactggtcagtcagaaggatgcgcaggggcgtgaaacccgttatgagtacagcgccgcaggcgacctgacagcgacgatatcaccggacggtaaacgcagcaccatcgaatatgataaacgcgggcgtccggtgagtgtgacggaaggcggactgacgcgcagcatggggtatgacgccgccgggcgcatcaccacgctgactaatgagaacggcagccagtccacgttcctgtatgacccggtggacaggctgacggagcagcgcggctttgatggcaggacgcaacgttaccagtatgacctgaccggaaaactcacgcagagtgaagatgaggggcttatcaccctctggcattacgatgcgtcggaccgtatcacccggcgcacggtgaacggtgaaccggcggagcagtggcagtatgacgaccacggctggctgacagaaatcagccacctgagtgaaggccaccgtgtggcggtccactacggctatgacgataaaggccgtctgacgggcgaacggcagactgacggagaagacggaccgcatcccgacgggtgtgatacggacggacgacgagcggacccaccactaccactacgacagccagcaccgcctggtgttccacacgcggatacagcatggcgagccactggtcgagagccgctacctctacgacccgctgggacggcgaatggcgaaacgggtatggcggcgggagcgtgacctgacggggtggatgtcgctgtcgcgtaaaccggaggagacatggtacggctgggacggcgacaggctgacgacggtacagaccgacaccacgcgtatccagacggtataccagccggggagcttcgcgccgctcatccgcatcgaaacagacaacggtgaacgggagaaagcgcagtgccgcagcctggcggagaagatacagcaggaagggagcgaggacgggcacggcgtggtatttccggctgaactggtggggctgctggacaggctggagggggaaatccgggcaaactgcgtgagcagtgaaagccgccagtggcttgcgcagtgcgggctgacggtggagcggctggcggcacagatagagccggtttatttgcctgagcgaaaaatacatctttatcactgtgaccaccggggcctgccgctggcgcttatcagtgaagacggcaatacggcgtggagcgcggaatatgatgaatggggcaaccagcttaatgaggagaacccgcatcacctgcaccagccgtaccggctgccggggcagcagtatgataaggagtcggggctgtactataaccgtcaccggtactacgatccgttgcaggggcggtatatcaccccggacccgattgggttgagaggtggatggaatatgtatcagtatccgttgaatcccatacaagtgatagacccaatggggttagatgcgattgagaatatgacatcaggtggactaatttatgccgtatctggtgtacctggattgattgctgcaaacagcattactaacagtgcttaccagttcggttatgatatggatgctattgttggcggagctcataatggggccgccgatgcaatgagacattgttacttgatgtgtcgaatgactaagacatttggatcaacaatagctgacgtgataggtaaaaatcatgaggcggcaggggatagacaaggtcagccagctaaagaaagaatcatggatcttaaaaataacactgtcggtattgcttgtggcgatttttctgccaaatgtagcgatgcatgtattgaaaaatataacactgggcaactcttcgggttagatggtataaaagcagataatccaataaaagcaaagcaagggagttcagatgcttcaaattattagaggcaaacttgtcatttttttaattaccctttgtttatttgttgtttaccttgggtttgataacaattcaaattctgacatcgtattttatggacataaaacaccaaagagcgttgagatatatctttctgaaaaaaatattatttataaaataattaatgaccaaaaaattagtagagggaatggtcattttataagtataatggttaataattacaggacgcactgtggagtggttgatataaatcttaattttttcaatgatattctttatagcgtgcgattaaaaaacattagtaaactggagaatatggagttctgcgctaaaaaacaacgggtgtattttagtgataaaaacaagaaggctagttataaaataattaattatggagactattacgatgttgattattatgataacaatttgaaaaatgaagtttttgactggattggtaaatggtcataatgaacaacaccagaaagagaaaaatataaaatacatacagaaagacatgagagcaagggacggggcagggcaagatcatgaaaattgtgatgtaaatcacgattttcatcttggctttaacgcctacaggtgatcaaaatttaacctttggaataactaaaaagataaaaaaggacccaggtgagtattcaaagtttgcttgattatatttcagtgatccctgatatacgacaacaaggaaaggttaaacataaattatctgctattttgtttctcaccgtatgtgcagtaattgcaggtgccgatgagtggcaggaaattgaagattttggacatgaaagacttgaatggctaaagaaatatggtgattttgataatggcattccggtcgatgacaccattgcacgcgttgtgagtaacattgacagtttggcctttgaaaagatgtttattgaatggatgcaggagtgccatgaaatcactgatggtgaaattatagcaatagatggaaagaccataagaggctcctttgataagggaaaaagaaaaggagcaatccatatggtgagtgcattctcgaacgaaaatggtgttgtactggggcaggtgaaaacggaagccaaaagtaatgagattacagccattccagagttgcttaacctactgtatttaaagaaaaatttgataaccattgatgctgtgggctgtcagaaagatatcgcttcgaagatcaaagataaaaaagcagattatcttctggcagtaaaaggcaatcaggggaaattacatcatgcattcgaggaaaaatttcctgtaaatgtgttttctaattataaaggcgattcgtttagtacgcaggagataagtcatggaagaaaagaaacacgtttgcatattgtcagtaacgtaacgcctgaacttttgtgattttgaattcgaatggaagggattaaaaaagctttgtgtagcattgtcattcaggcagaagaaagaagataaatcagcagaaggtgtaagcatccgatattatatttcatcaaaggatatggatgctaaagaatttgcacatgctatcagagcgcactggctgatcgagcacagtcttcattgggtgttagatgtaaaaatgaatgaagatgccagccggataagaagaggaaacgcagcctaaataatatctggaataaagaagatggcactgaatttattaagagattgcaaagacattaagggtgaagaggaaaagaaagaaggctgcgttaaacacagggaaagatcatcagaagttcactttttgtactaaataattcgcattttatgtttaaaaattgagatattcctcattacctgaagctgttttttattgcttatacatgatcaaatactccttacataaataaggtgaacaaatggaacttaaaaaattgatggaacatatttctattattcccgattacagataagcctggaaagtagagcataaattgtcaggcatcctactattgactatttttgccgttatttctggtgcagaaagttgggaagatatagaggatttcggggaaacacatctcgatttcttgaagcaatatggtgattttgaaaatggtattcctgttcacgatactattgccagagttgtatcctgtatcagcctacaaattcatgagtgctttattaactggatgcgtgattgtcattcttcagatgataaagacgtcatcgcaattgatggaaaaacgctccggcactcttatgacaagagtcgccgcaggggagcgattcatgtcattagtgcgttctcaacaatgcacagtctggtcatcggacagatcaggacggatgagaaatctaatgagattacagctatcccagaacttcttaacatgctggatattaaaggaaaaatcatcacaactgatgcgatgggttgccagaaagatattgcagagaagatacaaaaacagggaggtgattatttattcgcggtaaaaggaaaccaggggcggctaaataaagcctttgaggaaaaatttccgctgaaagaattaaataatccagagcatgacagttacgcaatgagtgaaaagagtcacggcagagaagaaatccgtcttcatattgtttgcgatgtccctgatgaacttattgatttcacgtttgaatggaaaggactgaagaaattatgcgtggcagtctcctttcggtcaataatagcagaacaaaagaaagagccagaaatgacggtcagatattatatcagttctgctgatttaaccgcagaaaagttcgccacagcaatccgaaaccactggcacgtggagaataagctgcactggcgtctggacgtggtaatgaatgaagacgactgcaaaataagaagaggaaacgccgcagaattattttcagggatacggcacatcgctattaatattttgacgaatgataaggtattcaaggcagggttaagacgtaagatgcgaaaagcagctatggacagaaactatctggcgtcagtccttgcggagagcgggctttcgtagtcttaccccgactctcccccagccttaaacacaacccccactcaccgcaacctaaactcatccgcatcctgccatgccggaaacttttctctatattcccgcaatgccaccatcgacagctccgcatcaatgcgcgttgcctgatgcgcgtcggcagtagcgataatctcgccctgcgggttaatcacccggctgtcaccgcgataatggcagccgttgccatcgctgccgacgcgattgcatcccgccacatacgcctgattctcaatcgcgcgggccgtcagcaatgcctgccagtgcagagagcgcggagcaggccagttggcaacgtagatggcgaggtcataatcgttgagattgcgcgaccacaccggaaaacgtaagtcgtagcacaccaacggcaaaatacgccagccgcgccattccacaatcactcgcgcattgcccgctttataatgtagatgctcatctgccatgcggaacagatgacgcttatcataaaaatgtaccgtgccgcccggctcaaccagcaaaaagcggttaaccgaaccagactccgtttgtaatgcaacactgcctgcaatcagcgcattgcactgctgcgccttagctgtcatccagttcactacgtcatcttgtgctagcgacgaagctgccgcttccatggcaaagccgctggtaaacatctccggtagaacgatcacatcgcgcccggtaataccttccagttgacgatcaaaatgacgcaggttggcagggccatccatccacaccagtggttgctgcaaaagcgtaatcttcaaaccaggcacggtgtacaactcctttatgcgaagggttttataactttaacaccttatcaggcagttgccttagcgcagaataaattgataacaaatgctgatattggaaatatctgatttgcaaattatcgtgttatcggcaggctttagaaggttaataacatgggcaggataagctcgggaggaatgatgtttaaggcaataacgacagtcgccgctctggtcatcgccaccagtgcaatggcgcaggatgatttaaccattagcagccttgcaaagggcgaaaccaccaaagctgcatttaatcagatggtacaagggcataagctgcctgcctgggtgatgaaaggcggtacttatactcccgcacaaaccgtaacgttgggagatgagacgtatcaggtgatgagcgcgtgcaaaccgcatgactgtggctcgcaacgtatcgctgtgatgtggtccgagaaatctaatcagatgacggggctgttctcgactattgatgagaaaacgtcgcaagagaaactcacctggctgaatgtgaacgatgcgctttcgattgatggtaaaacggtgttgttcgcggcgttgaccggcagcctggaaaaccatccggatggctttaattttaaataattagcggataaagaaacggagcctttcggctccgttattcatttacgcggcttcaactttccgcactttctccggcaactttaccggcttcgtcgccagctcttccggatcaaagtcatcaacgttaatactgcgcagacggctttcttcagctttcaccagaatagcggcttcatctttatcaatcagccccttcgccagcgcgttgtgcgccagttcatccagacgggtaaacggcaggtttttacccagctctttacagatccgctgatgaattgggtcggcggcaatcacatccaccagcgcctcttccagcaagccaaccggattatgctcgctcggcgtcaggtactgaccgcgaccaatgcgggaacgggtggcgttcggcacttgtaaaatcttcgccactttatgatccagcttgtcagaaggtgccagataatgacgtccggtcgggaagatcaccacattcagcagcccggcaaccacgcggttcgggaagttttgcagtaaatcatccatcgcctgttcagcctgatacagcgcatcttgtacgccccagtgcaccagcggcaggtcggcttcattacggccttcgtcgtcataacgcttcagaacggcagaggcgaggtagagctggcttaaaatatcccccagacgggccgagatgcgctcgcgacgtttcaggctgccgcccagcactgccatcgagacatcagaaagcagggcgaggttggcgctcaggcggttcaggtgctgatagtagcgtttagtggcatcgccggttggcgtgctgctggttaaaccgcgcgtcaggcccagccagaagctgcgaactttgttgctaccgacgtgaccgatatgtttgaacaacagtttatcgaacgcgttgacgtcattgttcttcgccgcttccatctcttccagcacgtacggatggcaacgaatcgctccttgtccgaagatcatcatgctgcgggtcagaatgttagccccttcaacggtgatggcaatcggtgcgccctggtaagcacgcgccaggaagttgctttgcccgagcataatgcctttgccaccagtgatatccatcgcatcaataatcgactgctgcccgcggtgggtacagtgatacttaacgatagccgacagcacggcaggtttttcgccgagcataatgccgtaggtaatcagcgatgccgcagcatccatcacgtaggcattaccggcaatacgcgccagcggctcttcaatcccttccatcttaccgatagagattttgaactgacggcgaatgtgagcatacgcgcccgttgccagcgctaccgatttcacgccgccggttgagttggaaggcagggtgatgccgcggcctaccgagaggcactccaccagcatccgccagccttgcccggccattttcggccccccgatgatgtaatcgatcggtacgaagacatctttaccgcgcgtcggtccgttctggaacggtacgttcagcgggaagtggcgacgaccaatttccacgcccggcgtggtggtcgggatcagcgcacaggtaatacctaaatcttctgcgccacccagcagcttttccgggtcggagagtttaaacgccagcccaagcacagtcgcaatcggtgccagcgtaatatagcgtttgttccaggtcagacgcatccccagcacctgctggccctgccattcgcccatgcagacaatcccggtgtccggaatcgcgcccgcatcggaacccgcttccgggcttgtcagtgcaaagcaagggatctcctgaccacgcgccagacgcggcagatagtgatctttctgctcgtcagtgccgtaatgttgcagcagctcgcccgggcctaatgagttcggcacgccgacggtaatcgccaggatcccgctcacgccggagagtttttgcagcacgcgagactgggcataagctgagaactccagtccgccgtactcttttttgataatcatcgcgaagaagcgatgctctttaaggtacgcccacaactccggcggcagatccgccagctcatgagtaatctggaaatcattcgccatccggcaggcttcttctaccgggccgtcgagaaacgcttgctcttcggcggtcaggcgcggctgcggatagttatgcagctttttccagtccggcttgcctggaacaagtcgccctcccaccaggtggtgcccgcatcaatcgcttctttctcagtgcgcgacatcggcggcatcaccttacggaaaccgcgaaataccggcgcggaaatcatcgacttacgcataggcgcaaagttaaatggcacgaggataatggccagaggcaccagtacccacgccgaccacagaccagcaacgccgagggcggctgtccaggcgagcaaaatcagactgctgataaataagctcacgcggtgatagaacaacgcgccgagcaggacaaccgtagcgagaatactcaaaatcatcataacgaaaagccccttacttgtaggaggtctgaccacttgtgatgatatggttgtagtggatgtaaaaacatttagcaatgtgtttacaatataattacaacaaagctcacattgttgctgtttttatccgcacttcaggtcaaaaagtcctggtcatagcacctgcccgtacttctcgcttttggcggtatccggtacactgcattttgtctattacatttatgctgaaggatatcctcatgtaccaggatcttattcgtaacgaactgaacgaagcggcggaaacgctggctaactttttaaaagatgacgccaatattcacgccattcagcgcgcggcggtcctgttagcagacagctttaaagccggtggcaaagtgctttcctgcggcaacggcggttcccattgcgacgctatgcactttgccgaagagttgaccggtcgctaccgtgaaaaccgtccgggctacccggcgattgctatttctgacgttagtcatatttcctgcgtcggtaatgatttcggtttcaatgatattttctcccgctacgttgaagcggtaggtcgcgaaggcgatgtactgctggggatctccacctccggtaactctgcaaacgtgatcaaagcgatcgcagcggcgcgtgagaaggggatgaaagtgatcaccctgaccggtaaagacggcggtaaaatggctggcacggcggatatcgaaattcgcgttccgcactttggttatgccgaccgcattcaggagattcacattaaagtgatccatatcctgatccagttaattgaaaaagagatggttaagtaagtctggcgtaggccggataaggcgtttacgccgcatccggcacttgtgcgctgatgcctgatgcgatgctgacgcgtcttatcatgcctacaaatctgtacgcgaaccgtaggccgaataattcgtttacgccgcatccgacctgaaaattcttaaatcaatcttcgccgggggccatgcgctcccgctgttgtggaggttacccatgtgcgaattgctcgggatgagcgccaacgtccctaccgatatctgctttagtttcaccggacttgtacagcgtggtggtggaaccgggccacataaagatggctggggcattaccttttacgaaggtaaaggctgtcgcacatttaaagatccacaacccagctttaattcccccatcgccaaacttgtccaggactacccgataaaatcctgttcggtggtggctcatattcgccaggctaatcggggcgaggtggcgctggaaaatactcacccatttacccgcgagttatgggggcgtaactggacttatgcccataacggacaactgacgggctacaaatcactggaaaccggcaacttccgcccggtcggtgaaaccgatagcgaaaaagccttctgctggctcctgcataaattaacgcagcgttacccgcgcacaccgggcaacatggcggcagtgtttaaatatatcgcctcactggcggatgaactgcggcagaagggcgttttcaacatgctgctttctgacgggcgctatgtgatggcgtattgctcgactaatttacactggatcacccgccgcgcgccgtttggcgtggcaacgctgctggatcaggatgtggaaatcgacttcagctcgcagaccacaccgaatgatgtggtcacggtgattgcaacacagccgctgacgggcaatgaaacctggcaaaagattatgccaggcgaatggcgcttattttgcctcggggagcgtgtagtttgatgccagttgtggctgcacaacttcgtggcttaacggcttgctgaccacgtaacgaccattgaccacagaaacggtcggtggcttacgggtttgctcaaagtagtcgtaacccggcttcagttgctcccagaagtccttaaagttggaatatttatggcgcttcatattggcgtcggtcatgcggaacgggtaaatactcacctgcacgctcggctgaccaaacaccagcgcaccagtaacgaactggaagatctcatcaataccctgattggtcattgcgtagcagccgatggaaacacaatcgccgtggatcatcaggtatttcccttcataaccatgcgcacggtcataggcattggggaaaccaatattaatcgctttgtagtaacggctgtctggttttaactgattacgctggacgctataaaacccttccgggcttttgaaatcgccctgacgctgttttggccctaagccgccggaatatttacagattttataactgtcgagcagctgatattgctcgcccattttgacgtagagatcgagcgtacgttcttccttgaagatctggatgtagacaggggatcccatcaactgctgcttatactctttgctcactggcgtggtcgagctactgctgcccagcaaaccggcaaacgaaacgcacgggatcaacaacatcgcaagaattaatgcgattttacgcatactgcttattccttgataaaacggttacacacgccaggacggcaaaatagatcccaaatcggaatagtctggatttggaaggctcacattatcaccaaaagagttttacgcaagcctgtcggcgcagggtttacaaatttcatcggcagcgtgctttacccaaagagcgccgcgtgagttccagttctctcaaatcgtaaaagtttatcggtaagtttgtaaatcaggatccagtccggttcgacatgagcatcgcgataacctttccatgaaccttgcagcgggtggtctttataaacagctggaagcggtaaagcattattgataagaagcctcataagatatttcaatttattcatatccttatgacgcttttgtgcaagttttacatcctttgaaaattgtcccgagtattcaatatccctttgaatcatatttaaattcctaatttatcaaataaatcatcggcgtctttggccttatgaacatcaacgccagcttcgctgtttttgattgattgaatggttaattgattaggctcgcgtaaatcaaacggcaatgccttttcacgcgcgacctttgtgagggttatgcgaaccaggtcagagatggtcagccccatcccggccagtacgtccgccgcctgattcttcagatcttcatcgattcgggcgcgaacaaatgcgttagcagccattggggtatctcctgtgctgtatatttattcagcttgaattgtagctcaaatgagcaacagcgacaatccatgagtaatttaataaacggatgtttttacataattaactgaaatatatttattaattttataataatggtttattaagtttgttcaggtacgggccgggatacactgcaacatcaatgcatgatcagccattattgagtatgtccttgccgtcgattccctcttttgtgttgtcgggattactgttgctttgcttgccgttttcttcatttgccagcgccaccacatcacatatcactttcagctacgccgcccgccagcggatgcaaaatcgtgcgcgtttattaaaacagtaccaaacccatctgaaaaaacaggccagctatattgtggaaggcaatgccgaaagcagaagggcgctacgccagcacaaccgcgaacagataaaacagcatccagaatggtttcctgcgccgctcaaggcgagtgacagacgctggcaggcgctggcggaaaacaaccatttcttaagcagcgaccatctgcataacatcaccgaagtagcgattcaccgtctggagcaacagcttggcaagccttacgtctggggcggtacgcggcccgatcaaggcttcgactgtagcgggttagttttttatgcctacaacaagatccttgaggcgaagctcccacgcacggccaacgagatgtatcactaccatcgggcaacgattgtggcgaataacgacctgcgccggggagatttgctatttttccatatccacagccgcgagattgccgaccatatgggggtgtatctgggcgacggtcagtttattgagtcaccgcgcaccggggaaaccattcgggtaagtcggttagctgaacctttctggcaggatcactttttaggcgcgcggcggatattgacggaagagacgattttgtaaatgggtaatattgacgaactggcaaaaggtcggatgccacgcggcatccgacctgtttacatctgggctgaaaactcacgttctaagacatcaacaatgagctggttttttgaaatggaatgttgtctggcgacgatggtcagccgcgaatcaatgtgatgaggaacacgaagcgtcaggcgtttttgctcttcttcttcacgaaaaggggcaataccgtcctcttcacaatccgccatccactcatccagcgcgctttcgccttcacgatataatgcctcaatacttgtggctacaaagtcacaataaccgtttacattgaggaacttgccgcgaaatgcgttgatatcggcttcaaatgtcactgcggctggttgacctttaattgtgataatgttcgatgctttattcataatctacccctacacagttaacaaaccactccttaagacctgctactgcgcctttatccatcacattctttggatgtggctcatgtgtgctgaatttggtcgttccaatctgaaattttcgtctggagccgttgttattttttattgttccacccaaagctttaatgagtgcaacaacatcatcccatttaattccagattttggcggctccgtcattacatcgtcgaatgtttttctatgacgagaacctagcgcgctgaccttaatcatactatcaatccatgacgtcattatatggtgtcatcgtagtctctttgcagtgtgacgtcaattaatggtgtcaggtgctgcaaagcatggaaaagaatcccccatcaactcaacgcccccataatcttcaactccagctcatccggcacttcgttatacgacagcacatgcagccccggcgcaaacaaccttgcataacgcgccagcaaagggcgcagctgcggtggcaccagcagcaccgggtctttccccgccgctttcatctgctctttcacctgtggcatcgtactctggaactggttgagcatattcgggtccactggcacgctgtcgagcatcactttaccgccctgttgcgcctgattcactaggttagtcagcagattttccagctcattattcagggtatacaccgtcagctcctgcttgcgaacgaacggatgggtaatgctgcgccgcagcgccaggcgcacatcggctgccagcagaatatgatctttggtcaccgcgctactggcgaccagcacggtggcgatggtgacgatatcgcgcagggaaacgccttcggtcagcaacgcccggtacactttcagcaactggctgtaattgagcgccgcgcttaagtcttccgccaggcgcggggccatcgacgacaggcggttatgcagttgcgtaatgtcatcatagttaaacaaatcaggaatatagctgcgcacaatcttgtttacatgggtggcaattacgctggcgctgtcgatcacctgataacccatattcagcgccttcgctttctgcgcaggctggatccaggtcaccggcatcccgtacgccgggtcgttccccaatacgccgtcaatctcgccgtaggtttcgctggagggcagggccatcagtttatccgccggaatatccgcttcatcagcctttatgccgttgatgaaaatggcgtactggctgggcttgaggcggaagttttcccgaatgcggatctccggcaacaatacgccgttgccgtcagaaatcacctgccgcacgccgcgaatccgctgggtgagcgggttaccctgcgctttatcgaccagtgccaccagcttgtagccgaggcttaaactgataggctcgatcagcggtattgtctcccaactgacttgttgctcgctggtttcagtgatggtgcgggtcagcgtttcgaggcttttctcttccgcctctgccgcctgcgggcgtttgctcatccgccagccggtaaagccaagcagggcgctgaacagcaaaaacggcagatgcggcatccccggcaccaccgccagcacaaacataattccggcggcggtgtagagcaccgacgggcttgccagcagctggttacgcacatcatgggcgatatcgccgttgtcgctgacgcgggtgacgataatcgccgccgccgtggagagcagcagggaagggatctgcgccaccagaccgtcgccgatggtcatcagcacatattgctggaaggcggcatcggcgctcaggttgtatttgaagatcccgatacagacgccgccgatcaggttgatcgccagaatcatcatcccggcgatggcgtccccgcgcacaaacttcgacgccccgtccattgcgccgtagaaatcggcctcgctggcaacatctttacgccgggtttgcgcctgcgcctggttgatcaacccggcgttaagatcggcgtcaatcgccatctgcttgccgggcatcgcgtccagggtaaagcgggcagaaacctcggaaatacgctcggcccctttggtgacgacgataaagttgattgtcaacagcgtcagtaaatccgagcgtgaaagcattatcgccgcgctgcacgggcagtcgatttttaacggtggtggctgtcgccgttaaataaaatcagcccgtctcatccgccaaaacctgccaccgtggcggtgccggaagagacggagaaaaaagcgcgtgacgtcaatgagaaaacggtgctgctgaagaagaaatccgccaccgagcttggcgagctggcaaccagtatcaacaccattgcccgtgatgcgcatatggaagcgaatctggagatggagattgtcccgcagggattacgcgtgctgattaaagacgaccagaatcgcaatatgttcgaacgcggcagcgcgcagattatgccgttctttaaaaggctgctggtggagctcgcgccagttttcgactcgctcgataacaaaattattattaccgggcataccgatgcgatggcctacaaaaacaatatctacaacaactggaacctttcgggcgatcgcgcgctttcagctcgtcgggtgctggaagaggccggaatgccggaagataaagtgatgcaggtaagcgcaatggcggaccagatgctgctggacgcgaaaaatccgcaaagcgcgggcaaccggcgcattgagattatggtgctgaccaaaagtgcgtccgatacgctgtatcaatactttggtcagcatggggataaagtggtgcagccgctggtgcaaaagctggataagcagcaggtgctttcacagcgaacgcgctagatgctgaatctttacgcatttctcaaaccctgaaatcactgtatactttaccagtgttgagaggtgagcaatgcgtaaaatcattcatgtggatatggactgctttttcgcagcggtggagatgcgcgacaatcccgccctgcgcgatatccctattgctattggcggcagccgcgaacgtcggggggtgatcagcaccgccaattatcccgcgcgtaaatttggcgtacgtagcgctatgccgacagggatggcgctcaaattatgcccgcatctcaccttgcttccggggcgctttgacgcctacaaagaagcctcaaatcatattcgcgaaattttctcgcgctacacctcgcgcattgaaccgttgtcactggatgaagcctatctcgatgtcaccgatagcgtccattgccacggttctgcgactctcatcgcccaggaaatccgccagacgattttcaacgagctgcaactgacggcatctgcgggcgtggcaccagtaaagtttctcgccaaaattgcctccgacatgaataaacccaacggtcagtttgtgattacgccggcagaagttccggcatttttacaaaccttaccactggcaaaaatccccggcgtcggcaaagtctcggcggcaaaactggaagcgatggggctacgaacctgcggtgatgtacaaaagtgtgatctggtgatgctgcttaaacgctttggcaaatttggccgcattttgtgggagcgtagtcaggggattgacgagcgcgacgttaacagcgaacggttgcgaaaatccgtcggcgtggaacgcacgatggcggaagatatccaccactggtctgaatgtgaagcgattatcgagcggctgtatccggaacttgaacgccgtctggcaaaggtgaaacctgatttactgattgctcgccagggggtgaaattaaagttcgacgattttcagcaaaccactcaggagcacgtctggccgcggctgaataaagctgacttaatcgccaccgcgcgtaaaacctgggatgaacgccgcggcgggcgcggtgtgcgactggtggggctgcatgtgacgttgcttgacccgcaaatggaaagacaactggtgctgggattatgaataacatacaaataagagactatcagcctggcgattttcagcaactatgcgctattttcattagagcggttacgatgactgccagtcagcattattcaccacaacaaattgccgcctgggcgcagattgacgaatctcgctggaaggagaaactcgcgaaatcacaagtgcgggttgcagtcattaatgcaaaactggtcggctttattacctgcgttgaacactatatcgatatgttatttgttgaccctgaatacacccgccgtggggttgccagcgctttgttaaaacctttgattaagtctgaatccgaacttacggtggacgcaagcataaccgcaaaacccttttttgaacgttatggttttcagaca

SEQ ID NO: 111 - DNA, 94823 bp, Escherichia coli
ctttgattaagtctgaatccgaacttacggtggacgcaagcataaccgcaaaacccttttttgaacgttatggttttcagacagttaagcagcaacgcgttgaatgtcggggagagtggtttattaattttatatgcgttataaacagcaacattaaatccagcttgcaatgaaaataacgcaagcctagtatgtgcgcgttttcttattccacaaactgcaaggaggtaaatcatgacaaatcctttatcaatgactctttgcagacctttccaggattaattctttttttcttgccctggattcgtctgccatttcctgattttttaattgttactctcaataattcaagtcgcaacacatgcaacttgaagtatgacgagtctatttacggaatggtatatgggcaattatattcgtcccttatccgatgcggtatttaccatcgcatctgatgacctgtggatcgagagtttagcgatccaacaattacacaccacggcaaatttacccaacatgcagcgcgtagtggggatgccagatttacatcccggacgcggctatccgattggcgcagcgttcttctctgttggtcgtttttatccggcactggtcggcaatgatatcggctgcggtatggcgctatggcaaacagatattctcactcgcaaatacaacgccgataagtttgaaaagcgattatcagatctggatgacgttgctgaagaaagctggctggaggaaaacctgccgtcagcatttgcacagcatccgtggcgcagctcgcttggctctatcggtggcggcaatcatttcgctgaactgcaacaagttgatcaaatcatcaacgctgaactgtttgcactggcaggtctggatgcacaacatctgcaactgttggttcatagcggctcgcggggggtggggcagtctattttacagcggcatattgcctcgttctcgcatcatggtttgcctcaaggcagtgacgacgcgctacggtatattgcggaacatgacgatgcgctggcgtttgcgtgtattaatcgccagatgatcgctttgcgcataatgcaacaagttaaggccacgggaagtccggttctggatgtggcgcataactttgttagcgcgtgtcaaatcggcgatcaacagggctggttgcatcgtaaaggtgccacgccggatgacaacggtctggtgattattcccggttcacgtggtgattactcctggattgtacagcctgttgcgaacgaaaaaacgctccactcgctggcgcatggggcagggcgtaaatgggggcgcaccgagtgtaaagggcgtctggcagcgaaatacacggcgacgcaactctcgcgtactgaacttggcagtcgggtaatttgtcgcgataaacaactcatctttgaagaagcgccacaagcctataaatcggctgaaagcgtggtgcaatgtctggtgcaggccggtttaattattcctgtcgcgcggctgcgtccggtgctaacgctcaaaaacagtggagggaaaaaaggatgatcttgctacaactctcctcagcgcaggggccggaagaatgttgtctcgcagtgaaaaaggcgctggacaggctaattaaagaagctgcccgacaagacgtcgcggtaacggtgttggaaacagaaacgggccgctactctgacacgctgcgttcggcgctgatttctctggatggcgataacgcatgggcattaagcgaaagctggtgtggcactattcagtggatttgtccgagtccgtatcggcctcatcatgggcgcaaaaactggtttctgggcattgggcgttttaccgctgatgagcaggaacaatcggatgcaatccgttatgagacgttgcgttcgtcggggccgggcggtcaacatgtcaataaaaccgactcggcggtacgcgccacgcatttggcatccggtattagcgtgaaggttcagtcagagcgtagtcagcatgctaacaagcggctggcacgattgctgattgcctggaagctggagcagcagcaacaggaaaatagcgcggtgctgaaatcgcagcggcgaatgttccatcaccagattgaacgtggcaacccgagacggacatttacagggatggcttttatcgaaggataatgaaggatgaaactgccggaaggcgattaaacgccatccggcagcaaatcaaataattacttcgccggaatttctttcagcagttcagtcagcagcgtccagtaatgacctacgctttcgatgtgaacttgctcatccggagagtgtggaccggtgatagttggcccgatagaaaccatgtccatttccggatacggttttttgaacagaccacattccaggcccgcgtggataatctggatgttcggtgttttgttgaacagacgctgataggtttcacgtaccagatgcatcaccggagaattagcgtccggctgccagccaggatatgcgcctttcgcttcggttttcgcgccagccagtttacccagcgaatccagcatgctcaccacgtagtctttaccgctgtcgatcagtgaacggatcagacagtgaatttctacgttattatcagtcatggtcaccacaccgacgttcagggaggtttcgaccacaccttttgccacgtctgagttgcggatcacaccgttcggggtggcgttcagcagacgaataaaggtatcgcgagatttcgcaatcagggcagctttatcgttcgctacagagtccagcaacaaggccagatttttctctttctctgccagctcgtttttcaggatctcctgataggtattcatcagagatttcaggacgtcgactttatcagctgcgacagcaatggtcgcaaaggcttcacgcgggatggcgttacgcagtgtgccgccgttgaaatcgataaggcgcagatccagttcttctgcatgacccgccaggaagcgcaccagcagtttgttggcattacccaggccaacgtggatttccccgccggagtgaccccctttcagaccttttaaggttaacttgaaggtttcaaaaccagctggaaccgcttcacgatctaaatgcaggttggaggtgaagtcgataccccccgcacaacccatgtagatttcaccttcttcttcggagtcggtgttaatcagaatatcagcctgcaaccagttgctctgtaagccgaacgcaccgtccataccggcttcttcggtcatggtcagcagcacttccagcgggccgtgaaccacgttttcgtcagccagaactgccagtgcagaggccataccaatgccgttatccgcacccagcgtggtgccgcgcgctttaacccattcgccatcaatataaggctggataggatctttcgtgaagtcatgcacggtgtcgttatttttctgcggcaccatatcgaggtgggcctgtaagacgaccggtttacgattttccatacctgcggtagcaggtttacgaatcaggatattacctacctgatcgcgttcgacatggaaacctttctcttttgcccaaccaacaatgtattcagcgagttgctcttcatgataggacgggtgaggaatagaacagattttggcaaaaatatcccacagcggctgtggagataattgagacagttcagacacgttaagtctccttgtcgatcacccgcaaaacagtattgcaggtcacagggttagcagaaaatgttgtcaacacaagacaggcttgcgagatatgtttgagaataccactttatcccgcgtcagggagaggcagtgcgtaaaaagacgcggactcatgtgaaatactggttttagtgcgccagatctctataatctcgcgcaacctattttcccctcgaacactttttaagccgtagataaacaggctgggacacttcacatgagcgaaaaatacatcgtcacctgggacatgttgcagatccatgcacgtaaactcgcaagccgactgatgccttctgaacaatggaaaggcattattgccgtaagccgtggcggtctggtaccgggtgcgttactggcgcgtgaactgggtattcgtcatgtcgataccgtttgtatttccagctacgatcacgacaaccagcgcgagcttaaagtgctgaaacgcgcagaaggcgatggcgaaggcttcatcgttattgatgacctggtggataccggtggtactgcggttgcgattcgtgaaatgtatccaaaagcgcactttgtcaccatctttgcaaaaccggctggtcgtccgctggttgatgattatgttgttgatatcccgcaagatacctggatcgaacagccgtgggatatgggcgtcgtattcgtcccgccaatctccggtcgctaatcttttcaacgcctggcactgccgggcgttgttctttttaacttcaggcgggttacaatagtttccagtaagtattctggaggctgcatccatgacacaggcaaacctgagcgaaaccctgttcaaaccccgctttaaacatcctgaaacctcgacgctagtccgccgctttaatcacggcgcacaaccgcctgtgcagtcggctcttgatggtaaaaccatccctcactggtatcgcatgattaaccgtctgatgtggatctggcgcggtattgacccacgtgaaatcctagacgtccaggcacgtattgtgatgagcgatgctgaacgtaccgacgatgatttatacgatactgtgattggctaccgtggtggcaactggatttatgagtgggccacccaggcgatggtgtggcaacaaaaagcctgtgcggaagaagatccgcaactcagtggtcgacactggctgcatgcggctacgttgtacaacattgccgcctatcctcatctgaaaggagatgacctggccgagcaagcgcaggctttatcaaaccgcgcctatgaagaggccgcccagcgtctgccgggcacgatgcggcagatggagtttactgtacccggcggtgcgcccatcaccggctttttgcatatgccgaaaggcgatggcccgttcccgacagtattaatgtgtggtggtctggatgcgatgcagacggactattacagcctgtatgaacgttattttgcgccgcgcggcattgcgatgctgactattgatatgccgtcggtgggcttttcttcaaaatggaagctcacccaggactccagcctgttgcatcagcacgtcttaaaggcgctgcctaacgtaccgtgggtggatcacactcgcgtcgcggcctttggtttccgtttcggcgctaacgttgccgtgcgtctggcataccttgaatcgccgcgtctgaaagcggttgcctgtcttggtccggtagttcataccctgttgagtgattttaagtgccagcaacaggtgccggaaatgtatcttgacgttctggcgagtcgtttggggatgcatgatgcttccgacgaagcgttgcgcgtggagttgaatcgctattcattaaaagtgcaaggattgctgggacgtcgctgcccaacgccaatgttatcaggctactggaagaacgatccgttcagcccggaagaggactcacgcttaatcacctcatcatctgctgacggtaaattattagagatcccatttaacccggtgtatcggaattttgacaaaggtcttcaggaaatcaccgactggatcgaaaaacgtttgtgttaaaaatttgctaaattttaccaatttggtaaaacagttgcatcacaacaggagattgcaatgacgttaccgagtggacacccgaagagcagattgatcaaaaaatttaccgcactaggcccgtatattcgtgaaggtaagtgcgaagataatcgattctttttcgattgtctggctgtatgcgtcaacgtgaaaccggcaccggaagtgcgtgagttctggggctggtggatggagctggaagcgcaggaatcccgttttacctacagctaccagtttggtctgttcgataaagcaggcgactggaagagtgttccggtaaaagatactgaagtggttgaacgactggaacacaccctgcgtgagtttcacgagaagctgcgtgaactgctgacgacgctgaatctgaagctggaaccggcggatgattttcgtgacgagccggtgaagttaacggcgtgagtgaaatgtgccggatgcatcacatccggcaatatctattaaaactgataggtcatgccaaccgcgacaatatcatcattattaatattcaatttgttatcgctatccagttggttgattttataatcaacaaacgctgacatatttttgttgaaataatatgtagccccgacatcgatataattgaccagatcttcatcaccgataccttcaatatctttccctttcgataagacataacccagcgatggacgcagaccaaagtcaaactggtattgagcgaccgcttcaaagttctgtgtcttattggcaaagccgccagttattggcgtcattttgcgtatttcagaataaaaagttgccagataaatattattggcatcgtatttcagacctgtagcccatgcttctgcacgcttgcctgtgccacggctttgcaggttctgctcgttggtgcgatctgagttggtataggccccactaatggcgaaatcgctgccgccaaagtcatatgtcaatgacgtgccgaagccatcgccgttttgctttttaacgtcgcggttttcgtttttcccttgatattgcagggttaagttcaggccatcgataacgccgaagaagtcggtgttccgatacgtcgccagaccgctggcgcgtttggtcataaagttgtcggtctgcgccgaggagtcgccaccaaattccgggaacatatcggtccaggcttccacgtcatacaacgcgcccaggttacggccatagtcgaaagaacccaaatctttatacttcaatccggcaaaagcgagacgcgttttttgctgtgcagtatcactctccgctttatttccggcaaactccgcttcccaacggccatagccagtcagttgatcgttaatttgtgtttcgcctttaaaaccaaaacggatataactctggtcgccatctttactgtcgttatcactcatataatgcatggctttaactttgccatagacatccagtttattaccgtctttgttatatatttctgcggcctgtacggatgcagatgccacaatgcccatcaccactaatgccagagtgctctttttcattttcattcctgattttaattaacgcgcgaatattcagcgggagagccccgttgaaaacaggaaagtttttaacctgagattgttaaagatatattacagattaataatattcttaaaatgtggtaatttattaaatctgtaataaaagcgtaaacaactgccgctaggcttgctgatcccgcgcaacaaaacgccatgctttgcttgcagatggttggcaaccgacgacagtcctgctaaaacgttcgtttgatatcatttttcctaaaattgaatggcagagaatcatgagtgacagccagacgctggtggtaaaactcggcaccagtgtgctaacaggcggatcgcgccgtctgaaccgtgcccatatcgttgaacttgttcgccagtgcgcgcagttacatgccgccgggcatcggattgttattgtgacgtcgggcgcgatcgccgccggacgtgagcacctgggttacccggaactgccagcgactatcgcctcgaaacaactgctggcagcggtaggcagagtcgactgattcaactgtgggaacagctgttttcgatttatggcattcacgtcgggcaaatgctgctgacccgtgctgatatggaagaccgtgaacgcttcctgaacgcccgcgacaccctgcgtgcgttgctcgataacaatatcgttccggtaatcaatgagaacgatgctgtcgctacggcagagattaaagtcggcgataacgataacctttctgcgctggcggcgattctggcgggtgccgataaactgttgctgctgaccgatcaaaaaggtttgtataccgctgacccgcgcagcaatccgcaggcagaactgattaaagatgtttacggcattgatgacgcactgcgcgcgattgccggtgacagcgtttcaggcctcggaactggcggcatgagtaccaaattgcaggccgctgacgtggcttgccgtgcgggtatcgacaccattattgccgcgggcagcaagccgggcgttattggtgatgtgatggaaggcatttccgtcggtacgctgttccatgcccaggcgactccgcttgaaaaccgtaaacgctggattttcggtgcgccgccggcgggtgaaatcacggtagatgaaggggcaactgccgccattcttgaacgcggcagctccctgttgccgaaaggcattaaaagcgtgactggcaatttctcgcgtggtgaagtcatccgcatttgcaacctcgaaggtcgcgatatcgcccacggcgtcagtcgttacaacagcgatgcattacgccgtattgccgggcaccactcgcaagaaattgatgcaatactgggatatgaatacggcccggttgccgttcaccgtgatgacatgattacccgttaaggagcaggctgatgctggaacaaatgggcattgccgcgaagcaagcctcgtataaattagcgcaactctccagccgcgaaaaaaatcgcgtgctggaaaaaatcgccgatgaactggaagcacaaagcgaaatcatcctcaacgctaacgcccaggatgttgctgacgcgcgtgccaatggccttggcgaagcgatgcttgaccgtctggcactgacgcccgcacggctgaaaggcattgccgatgatgtgcgccaggtgtgtaacctcgccgatccggtggggcaggtaatcgatggcagcgtactggacagcggcctgcgtcttgagcgtcgtcgcgtaccgctgggggttattggcgtgatttatgaagcgcgcccgaacgtgacggttgatgtcgcttcgctgtgcctgaaaaccggtaatgcggtgatcctgcgcggtggcaaagaaacgtgtcgcactaacgctgcaacggtggcggtgattcaggacgccctgaaatcctgcggcttaccggcgggtgccgtgcaggcgattgataatcctgaccgtgcgctggtcagtgaaatgctgcgtatggataaatacatcgacatgctgatcccgcgtggtggcgctggtttgcataaactgtgccgtgaacagtcgacaatcccggtgatcacaggtggtataggcgtatgccatatttacgttgatgaaagtgtagagatcgctgaagcattaaaagtgatcgtcaacgcgaaaactcagcgtccgagcacatgtaatacggttgaaacgttgctggtgaataaaaacatcgccgatagcttcctgcccgcattaagcaaacaaatggcggaaagcggcgtgacattacacgcagatgcagctgcgctggcgcagttgcagacaggccctgcgaaggtggtggcggttaaagccgaagagtatgacgatgaatttctgtcattagatttgaacgttaaaatcgtcagcgatcttgacgatgccatcgcccatattcgtgaacacggcacagaacactccgatgcgatcctgacccgcgatatgcgcaacgcccagcgttttgttaacgaagtggattcgtccgctgtttacgttaacgcctctacgcgttttaccgacggcggccagtttggtctgggtgcggaagtggcggtaagcacacaaaaactccacgcgcgtggcccaatggggctggaagcactgaccacttacaagtggatcggcattggtgattacaccattcgtgcgtaaataaaaccgggtgatgcaaaagtagccatttgattcacaaggccattgacgcatcgcccggttagttttaaccttgtccaccgtgattcacgttcgtgaacatgtcctttcagggccgatatagctcagttggtagagcagcgcattcgtaatgcgaaggtcgtaggttcgactcctattatcggcaccattctaatgtctccccaagtctactcaagtatttaaaaacctcttataatccgcatgttagcgccccttttagtcttttgacgtctacttaagtaccccaaaatctacagtcaattgggggtacttttgggggtatttgctgttcagtttagtggaggtacccccaagtgaaactcaatgcccgtcaaatagacactgccaagccaaaagagaaggcttacaagctggctgatggtggtggtctgtatctcttggtaaaacctagtggaggaaaatattggcgcttcaagtatcgtgtagctggtaaagagaagctgttagcactaggtgtgtatcctgaagttactttggctgatgctcgtgcaaaacgtgaagaagctaaaaggggtatcgctgggggtatcgatccgatggaagcgaaacgagaggaaaagattgcccgggaaacgcagttaaacaacaccttcaaagatattgcccttgagtggcacagcagcaaattaaaaaaatggtctgctggttatgcttcagacatcctcgaagccttcaacaaagatgtgttcccttacattggcaaaaaaccaatcgccgaaatcaaaccacttgaactgctgaatgtgctgcggcgcatcgaggggcgcggtgctaccgaaaaagccaaaaaagtgaggcagcgatgcggggaagttttccgctatgcaattgtcactggacgtgctgagtataaccctgcaccggatctcaccagcgcgatgcaaggtcatgaatctaatcattatcctttcctcacagccaaagaattacctgattttttcaaggcattgtccagttactcaggaagtgcattggttgttatggcggctcgtctactgattatcaccggtttgcggactggcgaactgcgcggtgcattatgggatgaaatcgatctcaacaaggctatctgggagatacctgcttcacggatgaaaatgcgtcgccctcatgtggtgcctttgtctaagcaggctctttcgcttattgggcagattaaagaattaactggcaattatccgcttatgtttcccggccgtaatgatccaaggaaaacaatgagcgaggctagcataaaccaagtatttaaacgcatcggctataacggaaaggttactggtcatggattccggcacaccatgagcaccattttgcatgagcagggctataacaccgcgtggatagagacgcagctcgcacacgtcgataaaaactcaattcgtggcacatacaaccatgcgcaatatctggatggacggcgggaaatgcttcagtggtacgccgattatatggattcgctcgagcatggcggaaatgtggtgcatggtgagttcggaaaatgcgggtgactggttgagtatacagtagtagactttgagcgacgaaagaaaaggctgtgtctaggggcgctcccgaaaatccgtacatctcgacggactggtacagccactacagtagaggacgctgaggtgtgcgtatgattgatattcatgccgaattaaacgaatacaaaaaagattttatttctttacgtgaatttcttgaggtcgtgcttaaggtcgctggtgatgattatgatgtttcagatgtcataacttggatactcaggagaataagcggagaacatatccgcctgtacacagtaaatgaatttaagctgttggaatctttttgtaacccgtatcgggatgaatttgattatgatgttctttatagaaatctgaatgcggttcggaaacgtggttgtttacctggtgagagggatgaaaatggttttctggtgtccggttattgggaagatcccgaatttgagaacattggatttataaggggtgaaattttcgcaatttttcccgatgtccttgacgcgttaacgaagctggaaggcgctaactcttctgaaaatgacgaggcacaaggacgcgatattgaaaagaaagagttgcgtacagaggatgatttattatcccaaatcgcaatgctggaaaaagaaaacgcagagttaagggcaaggatagagcagttagagcaagagcgcccgatacacttatataaatactgggataaagacccattagctaaggctattgagattagaaacagagagtgggccaattacgatccagaaaatgattttgccactaggggaaatcaagaagcgataaccagggagcttaagcagtggggggcaagtaatgctcttgcaacgctcatagagaggactgcctgccctattaaccgagacaacagccaaaagaacgcaaagccggattaacgcaccataccgcataccctgagggtgatttactgttaccctgagggtatttttttatcttccccgtcaattttaccatcacccttagggttaatttccttccggtaaccattaggcctgagggtatgaaaatattcgttatttctgtgccatgattacctcgtcaaattgagtagacgttatgaggtaaatatatgtcaaatacgcttattcgtttaacagaagttcagcgtagaactggatatagcaaggcatggatttatcgccttatggggcaaggtaaatttcctgcatcagttaaaattggctcgcgagctattgctttcgttgagagtgaaattgacgagtggattaatcagcgtattgctgaatcacgcggaacagctacctgattaaatggctacggggccagaagcccccagctatccaccagcaaataaaagtaacttaattcgatagcaggagtttttatgaaactgcgaaaaacgcccgtacaggggcagggcttcgttcggcctgaaaaccagaatctgcaaaatttcggcgaaattatcccggttatttccggcgttattggcgggcgtgaaaccaatattgttagcggcagagcgttgcataaggcgttaggtgtaggtcgcgttttccgttcgtggatcaaggggcgcattgaagaatacggcttcacggaaggcgtggattatgaggttgttgaatatttgagccgacccgatccggtgagcgcaaaatctcgccagcaaacagctcttgagtacatcattaccgtgaacatggcgaaagaactggcgatggtcgaacgcaccgaacaggggcgcgccgttcgtcagtacttcatcaaatgcgaggaagagctacacaaggttgcgcctgtacgttccgcagcgttacgccgggaactgaaagcccgtatcacagttgccagctactttaagccaatgtgtgccgcgctggaggactaccgggctgaactgggtaaaaacactctacagcaccactacaccacggaagccaatatgctggcgcgtatcgtgctgggtggcatgactgcaaaacagtgggcgcaggtgaacggcatcacaggcgaaccacgcgaccacatgagcacgttgcagcttgagcacctttcttaccttgagcagagcaatatcacgctgattgagttaggccaggactaccaccagcggaaggctgaattaattcgtctttcgcagcgttggttagcccgtcgcatggaggaaaacagccatgtgtaacgctctgaccgttacaaaaagagaaagcgccccgttgccggagcgcctttgtgaacgaatagcctactgcgccatattgcttactgtctacgaggcagattatagcgttgtggtcgcacagagtgaaggcgctgatcaccgttactacagcacgccagaaatgcagaatattttgctgcaaaatgccgttggccacgctgtccggaaagcaaaaaattttgctggtggcgcgactgatgcgattttgtcaggtcgccaggtgctgatcaatctgatgtctgatttcgttctggataaaacaaaggcgaccgcagagagccgccagtggaaaagctacatacttgaacgcatcaccaacaatgccacatttgcggctggtgggcaatgtgtcagctttgcaccaatgactctaggtttaactgagggtcattatggtgaatatgctggcttgctggtgggctattcctgctctttaacatcgccatgccgcgatgttttccaggtatgcgaccccatttttgtgcgcctgtactctttaaggaatttctcaaggataaacgcacagggcgcgaatctgtctgactcatgctcgtacgctatctttctgcgctgtcttttccgtgccggtgatggtgtattggttgattctttgttggtcatggcgctgccctgtaaaacgatgcaccgtagttcctcacaccacggcgctggtgatggttactcctgttctttggccttgcgccgctggagttcttcacgcgcgacggtgacgagttgcccgatctcctcggctgctttgacaccgattttttccacctgcgccagtgcatcgagcgaagaaaccaggggattttctccgcttccttctgcctggcggcgggcgatttcaccgcgaacggctgtaatcacgaaagcggctattgtttccccttccgttttcgaattttccatttcctcgattacatcatgggggaagcggatatttttcatttgcgatctgctgttgatgtttcctgttgccatcagaatgtccggttattttgaggtgtgtacacattacaccaaaaggtgtgttgataaaacacttgacactgtagcacacttaaatctaatctgtatatacactaatgattgtggtgtatatacagcaacgccccgcagtggtggcacacatgcagggcgtctaaccaaaccgttaaacgaggtaacgattatggctggaacacagcatacccaaactcaccctaaatttatatacaccttcctggcggtgcaccgtgattgcatagctgacggtaaaaacactgtacacgtagccgctgatacgctggttgatgcctgcgagatgctcaatgacatgggctatatctcggcaacatggaaagggcgcgaagaaaacacgctgtttattcagaaatgcgagaacaattttatctggcgttttatcgccctgagcacagcacaaccgcgcgtaattcacatcgaggccaccagcgaacaggaagcgcgtcagcaatctcctgatggctgcgtgatggtattcgctgcccgtattcgctaggaggtgcaccatgcataacctgtcaatttatgaccttaacagcattcagtttcgtgagaaattcaccgagcagctactggttaacgtggagaatggacgcgtggtaagtaattatcacctgccggatggtgcaattgccggaagcgttgaagcattgctggaactggcagaacgtgcgcgacttattaagccgttaacgaaccatcacgatgatgatctgcattttaccggacgcatggtgagtcactacgaaaacggcgtcgaggtatcccgcgaacggctgcgtgatgattgctgtttcggaacactgccggaatttagcgaactgctgacccgttgcgattaccggatcattcaggggggaagtcatgggtaatcagccagcaacaatgacaattaccctgaatgtgccagatgatttcaccgggcgcgtactggtttacctggataaagggaaagtgaaatcacaatgccgactgcgaaataatgaaattgtaagtacggtagaaggcttttctgaactatgtattcgtgcaggaataaaaccggaactgctgacaggaaaataaaaccatgaaaaagaaaaattctggctttactgccagcggcctctctcggtctgcaattcgctctggcgatatttaccgcgacaccagacgtgggggacgagtggttattcgtcacgttacgccaggcaatatcacctaccgccgtgaggcttacgaatatgactgcgtaatgccgcgccgtcagtttgagcgtgattttattctggtggaaaacaaacaattggcggtggcaagacgtgcagcctcgaatattaaaaaaatccgggcaatgttggttgcgggaggtaagaagtgaaaaacgcaccgaatttaaaatatcagccaaaggataaattcaccgaggtaatcatttttgccgggacggatgcttacgcccatgctcaacactggattgaaagcgaaggacgaaaacacggcgataacgtgccacctgtttacctggggccaacgcaactggcagatctggctaatatccgcattatcgacgatgagcgccgctttgcgcgtgtttatatcgcgggggagatagagccaatccagatcaatgctatcgctgaaaagctggcgctggctggcgtacaggatgcgaaattatacaaaggcatcaccgaccgggagccggagaactggcgcgactacctgcaacggatccgcgaacaggcagagcgcggggaaaccattcctgaaggaatcggaatagctggtggatcacccggtaaaacagaccccatgaaaccgcatattaccgaaaaagacggggcgctctggtatatcgagccaatccccaacaccagggcagaggagatgaattataaagaaacctggctgagtgaccggatgcgcacggcaggtattggtaacgacggaagggaagcgtatctgatcattgaaatgatcccggaagggacacaaaaaattatttacgaagcgatgccgcgcaatgaaatcggtatgcccgcaggatgggcgcgattacgtgggcggggagttgcaatcactaccagtgcccatttactgaacaaactggcggaatacctgcaacgtcatggagatcgcacggtgtgggaggtcacatcaacagcaggttggcattgtggagcctatgttatgcctgatggcgaggtgattggtgtgcctgaccgtcccgtagcattctgcggcggatctgccgccatcaaaggctatattgtcaggggcacggtgcatgaatggcgaaataatgttgcttctctgatgcgtggcaatcactcaatgatgcttggggtgctggtcgggctggcagccccgctaaattcccttgtgggtggtagttgttttggtattcatcttttcgcgcagtcgtcagcggggaaaaccacgactgtggaggccgccaccagcctttatggcgaccctgaaatgcttaaactctcgtgggatgccacccggcacgggctgacagtggaagcagctgcacgtaatgacggttttatccctattgatgaaattggtcagggaggaagggttaatgacattgcgcaatccgcctacagcctgtttaacggtgtgggcaggattcaggggcgcaaggacggcggtaatcgtgcggtaatgcgctggaaaatagcggcactaagcaccggagaagaagattttgaaaccttcctgttaaaagggggaattgccccaaaggcagggcaactggtgcgactgctaagcattccctttaccgatacaacggtgtttaacggttatgacgatggtgatcaacatgccagggccataaagcgactttcatcaaattattgtggcgctgcgggacgtgagtgggtgcgctggttatccgctcacaaggagctggctatcaacaccacttcagataaagaaaatgcctggctgggaaatctgcctgaaaatgcctcgtcacaggtaaggcgagtggcatcgcgattcgccatgctggatgcagccggagagcttgccaccgcaattactggctggacagctgaagaatgccgggaagcaacgcaacgggcttttgatgactggctacaggatttcgggctggaaaaccgggaaaaatatcaggtcatcagtcgcgcccgtgactttattcagcgccatgccctgagtcgttttcagccttatacctacgggaaaagcaatggggatatggataaccactatgcatcccgtataagcaatcttgcaggctatcttgtcagcggtaagcgtgaggatggaaaacccgaatatcacattatcccgtcagtgtttgatagcgaaattttatgcggtatatccaggaactttgggtgtcaggcgctggaagaagccggaatgctggtttgtgcagaacctggtcgctggacatcgaaaacagtgaagattaacggaacacagcagcgatttatcgtgctgattgatcaggcagaagacgaatagcacaacctacgctcgcagagggtcaaaaatcgcgggatatgcgggatatcgggatatggaaatatattgcataaatatcagttatttatgtgttgttgtcgtatcccgctgtatcccgccgtatcccggtatttaggtttacgagtggttgtaaaacaaacaaaataaccgtatcccggaatgtatcccgcaatatcttattgatgcataagcaaaaaaaaacttaccgggatatggcgggatatgaaaaatcacataacgctatgaaataaatgggttttttttgtttatatcccgatatcccggtaaaaaatgtttttttacgccttatagagtacagaaaaaaaggttgttcaaattttgtattacgattgactactgtcagccatcccacccggaaaaggcataaaagctgacaggtaactgacaatgagactgttttatttttacgtgccgatatgacggcaacaatgatggggcagagcatgacaaaactgaccattaacagaaaaccgaaaggtatttacggcacgccgcagaaaacgacgcaggcggcacagaagcaggataaaaccacatcggcacataaagtgatgcccggtaaccagaaagcgcagcagaagcccacaggggcgacaccgtggcggcatatgaccaaacgccagcgcaaaaaccgcaggcgcgttaaccgtctcactgagttgtggcctgaattattcagccgggaagcaccgaagccacttaaggtggggatattcgacgacctgatgcaggatatcgccgtcagggggctggcattcggtccaggggcattacgtgcgacgctggcatcttatgcgcagtgtccgcgctattaccgcgccttaatggctggtggggtgcgctatgacctgaaaggccagccgtgcggcgaggtgacaccacagaaacagaacgaggcagaaatgcggctgatggcgctgaatgagaagcgcaaacgccagcgccgggcagccagggagaaaacaggcgcatgattcacgacagcaaagcggaagcactggaagcgcgtggactgtaccggagagcggcggcgcggtgggctgaggtcatcatgctggcgaatgatgacaaggcacgggaacaggcggcaaaacgtcgcgcggaatgtatccacaaggcagcacgcccaccagcaaggcaggataatttcggggagatgcgcgaaaccatcagccgggcacatgccgggatgggattacatcagcccaatggtgaggcattcaggaaataccaaaaaaagaacaattgtagtcagtaacagaggatgggattctcttggtttttgttgatgctttctgaggaaatctactacgttgctgagcagatgaatattcaattgcatctgggttcctgataagattaatctgaatattttcatttggaatagggatatgaataaaactttaattgcaacattagtcggtatagtaatgttaaccggatgtgggccagaagagttaactccagaacagaaacaggaagtagctgctcttaaagctgaactgtcgcaaacggaaggtgaaatatcagcagctaaggaagttgaccagcagttttctggtgggttgataaaaaatctgacaacagcaagactggaaatattaggaactaataaagcgcttttggaacagcgtattaatgctattgaatcaggtgccaaaattgatgttgttgtatctggagtaaaacctgatcctgagcttgcggcttcaattaaaactgaaattgacagcttagatgcaaaaatcaacgaagccaaagctgatgctcgtcagtatagtggtggtctgataaaggtactaaaattatctactgttgccactgaagagcagaccatggcaatgttgcagcaaaagtacctcacagccaagtatggcctcgctgaagttaagctggcatcagtacaagctaatgacgcaaaaaacagtactgaaacggaagtaacagccaaaaattcccaagagcaacttcctttactcccgccagcggatggtccgtttggcttagaagccggtcttacacagaaaaacatcgaagatatgatcggtgctaagctcaagccactaccagacagtgtgaatctgtatacttctgataaattaccgaagcaaaacgcagattttgaaatgtatggtttgctgatctccccgaaagctggtttatgtcaaatacgggctttaggaaaaaatattgatactgatagctatggattggctcttaaatccaagtttgaagaattgagtaattctttaagttctctgtatggaaaggctgatactacagactttttgctggctggttcaatttggaaagatcctcaggactggatgagggggctaaacaaaaaagaacgcttcttatctgccacatggaagggaacaaaagaaataccattaaaaaacaatattgatactatatctattgaggccagagcgaacaattccactcagggatatgtctatctgcagtactcatttacaaatgacgaaatttgtcaggcagaaattgaaggggcgaaaaaaagttccctttaaacaatccgtgcaaagccccttagtaaggggcttttatatattaatgttcaacgtgggggattagatgaaagataatctagcaaaactaattgaaaatactttaaaagatattctattagctaatgctgctctaacattcatttttgcaataccaatggctattatcagtaggcatgggatgggcatcacaatctggtttataactgtgctcattgcacctgctctgtgtgcagtaggtgcatggcttgtatctcgaacatccggccatgctgaggagttctttcatcgtcggtgggctaagcgaatttatgttttttatactcttgcggctgccgagtttttgcttgtgtactcaatcgcgcaaataatgaaaaatctgatgaaataattaacaagttattatcatggagcttgtggctgttaacctgcagtgaggcgacaatcgtgtatttataaaaacttccccttttcactccccgcagcttcttctgctattgcctttatgtttgcatgcaccaacatctgccatacctttgcagaaaaatcagagcattcagtgccgaaggttggtttattgatgcttttcgtttcatttgttgcaattgtctctggtatcatttcaatttgtgcaataattgcaattattgtcattcagaagggatcatcatgaaaaatcacggagtaaagccagttttactttcccggaggcagatcgaagccctgcaacgcatccaggacgaagagcgtcagaaatctgtgcttggtgtggcaccgtcgattcatgttatcgctcggcaactgatggataaggcacttaaagaggtgagactgtgaaattaaatatcagagtggataaacgccagctatggcagaaaaagagaacagcgaggcattcagggcgttgctggtggaaaatcttcagcatcggttcagtggagagttgcctgatgctctagggaagaaactggaatccctgacggtggaaattggcgattatggctttgttgatgttgaaagcacgactgccaacacagaaatcgtaaaacaggtcgtcaatgatgtaatgaaaaccacgcttagccagccatcctggcgcaactgaatcagtaaggggcggttattgcccctttcctccatacccacaacgcattccctttccgcatgaaattattttttatcgtatatgcatgaggtgagctacatgttgatgagtaaagccgaatacgccaaatacaaaggcgtaagccgccagacagtttacgactggctcgagaaaggcgaagtggtcatgtccggtaaaaaaattgatgtggaagcgacagagcagcggaacagcccaccagcacaggggaaagacaccatttctgaaatgtggccagaaagaacgctggaaatgacatggggcgagttctggaaagcagttaaggccagagacggtaaaattcctgcgccagtaacggacgagggcatacagcagcgtgtgctgtatgcagccggggaattaggctgggaagtgcactttcttgatgatggtgctatctgccttgaggatgatgaagggcagcattactttgaaaaatacaatttgcgaggtaatgccaggctggcaattcgtatgctgcgttgcgaactctgctatgttgcaggtgattatcccgatgaaccggaatcatggagtgaagccgggttaaacgccctggctgagtgggaaaaatcagaccatcaatgacatcaaaaagtgtcaagttgagcagcttgccgggttgacactttacactctgaacacgaaaaagtgtcaacctcgctgtaagccccgccgttactggccttgcgccagatttaccacgtcaaaaagccgaaaaaatcgcgaaaagtgtcaagttgccatgcttagaaatgccaggggaggttaagttttgttaaggtttttcccgaaaaagtgtcaagtgtgtcaacccgcgatatacagatttattaaggttttgagccagaaagagttaaccgcgccgctttagaaaacttcaggcacgcatttgtgaaagcatcaaatgaagttctgtcatactttgcaaatcatgcagatgcatcgttactgagcattttaagttacagttgatgcggactgtccactttaacctttcaaaacgtttcgtagtaggtactaactagaatgccaagagtctttcaggttccgtgatgtttagcgttggatttgatattaagtgtttaaattcaatgtgttacattgtgttataaagtttattgctaacaactgtagggtagatgccaagcgcacgctaagcatgttataatcatttcaactttcataataatggatacgagagtggcgacgataatcaaaaatatagcaatcaaaggtctttttaaacggaaggacattgattggagtttaaaagatgtgaatgttttagtgggtaaaaatggctcaggtaagagcacgataattcaaagtgtttttgccctcttaaaacaagaattaaatgaaagtttaagtaatgctgcgttggctcaaataacattggccaatggaggcacaattactcacaaagttaattttcgcgaaattgactctgtccagcttctaaacctacttaataaccttaagaaaaacagtattaaaggtaaatcaaagggtaaggaaataaaggagttaaatgaacttattgagttgcttgaatcgaaaaaagaagacactgaaattaaagagttcgggatgggaactgttagcgtaagtgataatattaaaaacactaagcgaataaatgttgagttaatatcaactatcaatatgagtgccaattccatctatgaattcaaaaaaagtgatggtgagcgcaccacaattcttgatatggaaattgctggtgaattagaaaggttaaagaatactttcaaagtaagtgagtctaaaggtattctcataaaggataagttggaatcagctataaataatttattttctgaatgtaacaaagttgtttcttttagtaatggtaacatttctattaagatgagtgattctggtgaagatattaggtataatcttctttcatcaggtgaacgtcagttgttatatattctgattaaaacagctaatacttcattggatgaatctgtcttgttgatggatgagccagaaatatccttgcaccttacgtggcaagaaagattaataagcaccatcaaatcaattaacgataattgtcagttaattattgttactcatagtcctgcaatattaatgaaaggctggatggattctttcgtagatataaaaaatatttcaaaggaatcttctcatgactgagtttgaggatattaattttagcgaagaatatcttcaggtatattgtattatggctggacacaatggctttgtctttgttgaaggtctaaaagacatttctttctgggaaggcttattaaacgataaagataatgatatacgttttgatatttgtaaccctaccaataaaggaacaaaagggaaaccagtattaaaaaattcatgagccgagcaaatcgatatgccatatttgcaatggatagtgattttgattatttatgccctaaaaacagtacagactcagagataatttgcagtaacaagtttatttttcaaacatttgtatattcaaaagagagcatcgagttacaccatgaagtccttgagtattgtctttctcaaataaagatcgctactgaaattaaattcgattttacagcatacattacagagtattcacggttgatctaccccgtgctgaagaaatttttattgcttaaacagcatcaagttagacttgatgactcagttttccatgaagcgattgctccttctgtgccacgattaacgaaccaatttgttatcaaaaatgctgtatttgaaagtatgcagcaatctaaagcggttattgaagaaaaacttgataaccttattcaagatgaatacgatgctgataaattctatgagcagttatatgataaaggattgagagaagataacgcctatcaatatatcaatggtcattttttagctgatagagttgtcatgcctgtcataaaatcattgatagagcaattgaatattaatgaaactgccttaatagtcaaacaatgcaaagataaaccaaccttaatctcggaaagaaagagtgagctaaaaaatattcttgaaactgatttgaatattaatacgctattacactgttgcaaagaaaagttcaaaactccttgtgctattgcgatcaaagaaaatgtagctcgagctttagcatgacaatggaaaataaaaaacctcatgcccttggggtttttttgctaattaattctgttctaacagaaggttatgataaaacttttaaactgtagaaatagaaaacatgacatggccttcaataaattgaaattttattcgtttggatatctttcttaattgacaaagtgaatgaagacataaagctcttaaatgaatagcttttatgtttttcccggagtctaatcatacaggcgcttatgggggtacttttgggggtatgttgaaaactaaaacataaaaatataatagaaatcaattggttatgtggtttgatttgttcctattatcgcaccattaaaatcaaagagttaccccatatttaaatacaccacgtttcctcctgtgccgcatttgtgccattgtaaccttggcaattcatcaaaatactgttctgacatcaggcagtgcaggtgcagctatttaaaccaattgctgccgccattctttgacgtagtcaatcagggcgcggagctttggtgcaatattgcgacgctgtgggaaatacagatagaagcccggaaattgtggaagaaagtcatcaagcagcgatacaagcttaccgctttcaatatatggcctgaaagtttcctgagtggcaattgttattcctccgccggcaagagccagcctcaacatcagacgcagatcattagtcgtaatctgcggttcaatcgcaaggtcgaaagttctcccgttttcttcaaatggccagcgataaggcgcaacctccggggactgacgccagccgatacacttatgggtatttcccccggaggcgagaaagcgctctccacgcccggccgcaaggatcaggacgacgggggcaggcatgaatcctcctcctgatggagacgtacagaggcgacttctgccagcacggagagtgccagagtatgcgcatcccgggctttggggaatatcccgacgggtgcccggatttgcgttgtttcctccctggaccatcccagctcgtggagcttttgcagacgtaacgtgtgggttcgatagctgcccaatgcgccgagataaaagggttttgcttctcgcgcggcctgcaacactggcagctcccggttgagatcatggcacagcaaaatgaccgccgtatcggtatcgatctgagcgctggctgaggccggaaaaagatcgaagatatggctgtcatagcctgtggctgctgcaagactcgcagttgcctgcgcctcaagagaacgtccgtaaatcatcagcctgacgcatggcctgaaccccacctcaaagccattgagattccagcccgttcgggtttgcgtgggcaggcacaccagcgattgtgcttgcggatcgtagcgcagccccgccggttttctctgttccagacggttcagcacggcgagcagaggctgtgccgagcgtagtttatggagcgtcagcgtgatcccaccgccgcagggcagaacgatgtcaaaccacggcgaaccttcgccatagcgaatttcgcgatcgcggcctgagcccatcatctccagcgcttcaaaagcggcagcggcctccacgcagccgccagagacaaaaccgcagtaacgaccatcttcgcgaaccaccatctgcgccccgagcgggcgcgctgcgccgccgcgtatctccaccagcgtcaccagcaccgctcctttaccggacattagcgcctctacggcgaagcgcagaatggtccggtggtcatcggtgagaaacgcctgctctggcttatgccagtgttcgtctttatcaaaaagcgggtatgacattgtttctccttaaaccacatccggcagcttatcgagcagcttatccagagtgatgggataatcccgtacccgaataccggtggcgttatacaccgcgttggcgatagccgcgctcacgccgcacaggcccagctcaccgacacctttggccttcatcggggaggatatggggtcggtatcatccaggaaaatcacctcctgttttgggatatccgcatggaccggcacctcataccccgccatatcgtgattaacgaagtagcccaaacggtcatccaccgccagctcctccatcagtgccgcgcccatgcccatagtcattgcgccaatgacctggctgcgcgcagttttcggattcaggatgcgtcctgcagcacacacagcgagcatacgccggacccgaacttctcccgtcgcgctatgcacgccgacctccacaaaatgcccggcaaaggtcgactgctggtactctttgctcagtgttccgaattcaatgctctcttccgctgtcagtctgccgcctgcggtggcttcatgtagcgtggcgcttcgggtaccgttggtaatcttgccgtcggcaaactgcgactgctcaggatcaaacccgactgccgaggctaatcatttcgcgaagcttcatacaggcggcgtaaacgccggaggtggaggtattcgcgccccattgtccaccagaacccgcagaaaccgggaaactggaatcgccgaggtgaaccgcaacctgctccagcggtacgccaagcatttccgctgccgtctgggccagaatggtgtagctgccggtgccaatgtcggtcatgtccgtttctacggtaacggtgccgttttgttcgaggtgaacccgagcacccgatttttccagcagattattgcgaaagcccgccgcaacaccgtggccgactagccactccccgtcgcgcacctgtccgggtgtggcgttgcgctgcttccagccaaatttatccgctccggtgcgcaagcactcgataagctgacggcgagagaagcagcgcgtcgggtcggcggggtcaacctgagtgtcattcaggatgcgaaactcgacgggatcgatgcccgctttttccgccagttcgtcgatcgcgatttcgagcgccatcagaccgggggcttcgccgggcgcacgcatggcgttcccttccggcaaatcaagcgtggcgagccgcaggccggtatgacgattcgccccggcgtagagtaattcgctttgctgtaccgccgtttccggcgtgccgccgggcaggtttccagaccagctttcatgtgagatagcggtgattttcccgctctggtcggcaccgatacgcaagtgctgaagggtggcggtgcggtgcgtggtgttattgggaatagaggggcgggggagcatcactttaaccggacgtttcaccgctcgggcggcgagggccgccagcagcgcatcgcttctcaggaacagcttgccgccaaaccctccgccgatatacggggagataatacgcacattctccacgggaactttcagcgtttttgccagatcggtgcggcaccagtcaatcatctgatttgaggtccagagggtaagcttatttccatcccagacggccatcgaggcatgcggctccatcgccatatggctctggtccggggtcgtgtaggtagcatcaatcttcaccgcagcggaggtgaaagccccgtcaaagtcaccgacgtttttgtcgggcgtgtcttccggcggctgattgacggcctgtttttcgtccgccagggagtaagctcctttattacggcgatagtgtgcctgcaccagcgaggccgccgctcgcgcctgttcgaaggtctcggccactaccagcgcaatggcctgatgatagtgctcaatagtggggccgcctaacagtctggcggtgtttttgtcgcctttgccgagtgccccggcgttactggcggtaatgacagccagtacgcccggcgctttttgcgcggcgtccgtatcaagggcggtgaggcgtcctttggcaatggcggaaccgacgatatagccataggcggcgttgggggcttcttcatgccattcgtaggcgtagcgtgccgtgccggtagttttcagcggtccgtcgatgcggtcatggggacgaccgacaaccttcagctgatcgatcgtgttttcccctgcgggtttatcaaatttcatgcctgtgccctcgcttcagccagtacggaggcaagcgttcgcttcgccaacaggagtttaaaggtgttttcagcggtgggatgggcgctggcgaacagcgtgtcatatacggcctgcgccccctgggatagctgagcatccgcagcctcaatgcgccagggcttatgtgctactccgcccagcgcgacgcgcccgctgccgtcagggtgaataatcgccgcgaccgataccagggcaaaggcgtaggaggcgcgatcgcgcaccttacggtagatatgttttccgccgagcggtggaggtaacgtcaccgcaacgataagctcaccgggaagcagggcggtttcaatgtgcggcgttttccccggtgggtgataaaaatcagccagtgtgatactgcgagtctttccctccggcgtgatggtttccaccaccgcatccagcaaccgcattgcgaccgccatatcgctcggatgggtggctatgcaggcttcacttacgcctaccaccgcgtgctgacggctaaagccttcaagcgccgcgcagccgctcccgggcaggcgcttattgcagggctgattggtgtcgtaaaaataggggcagcgcgtgcgctggagcagattacctgcggtggttgcctgattacgtaactgaccagatgcgccagcgagcagggcgcgggagagtaccgcgtaatcacgacgcacgcgctcgtgagccgccaggtcggtgttccgtaccagtgcgccgatgcgcagcccacccgcgtcggtcacttcaatcttatcgagcccgaggccgttcacatcgataaggtgggtgggcgtttcaatttccagcttcatcaggtccagcagattggtcccgcccgcgataaattttgcgccgggtacgcgctgagcgctaagtgccgcctcggctggggtgttcactcgttcataggtaaacgccttcatgattttatctcccccgcagcatcttcaatggcggcaaggatgttagcgtatgcaccacagcgacagatgttgccgctcatacgttcacggatctcatcggcagttgtttctggagcggaaaccaaatcgaccgtgacgtgactgggaatgccgtcctgaatctcttttagcaccgctactgatgagcaaatttgcccggaggtgcagtagccgcactggaagccatcatgcttgataaaggccgcctgcatggggtgaagattatctggcgaacccaggccttcaatggtggtgatctcggccccctgatgcatgactgcaagcgtcaggcaggcattaagcctgcgaccattgaccagcacggtacaggctccgcactgtccgtgatcgcaacctttcttggtaccgatcaaatgcagattttcacgcaaagcgtccagtagcgtggttcgggtatccacctcaagctgctcggttttgccgttcaccttcagtgtcaggggcattatctctggcgcgggtgtagctgccggaacgcttgccgccagcgtagaatgaggataaaccacggcggtcgccgctgttgcggcgctcactttaatcagatcgcgacgggtcaaacttaaatcgtgcggctcgtgcttcccaacccgattatcttcggggtattcgccttggttgctcataccaggcctccggtattctaaaggggaaaataagagtgcgttgcgagagtgctgatgcttttttaaatgttaagcatagtcggcgacagcaggaggattattcttaaaacgcgaatgcagctatgagcccggctaataaattcatgttcgccgggatgttgatgatgatgggagctggtttattgctttagttgtacgatgcaaaaaccaataaggaaacctgtgattttcagccctgcatcaccctgcaaatctctgtcacttctaatataaaaatagggagaaatgatggagcttatattcattggcgattaggaaaccatcttgttatacaaaacaatacagttctttacatttgccttgttttatgaatactcctgaagaggtgtataacataatggtacaagcagggtagatatgaatatatttgaacaaactccaccgaaccgcagacgttatggtcttgctgcattcattgggctgattgctggcgttgtttccgcattcgtgaagtggggggctgaagttccattgccgccacgtagcccggtggatatgtttaatgcagcgtgtggcccggaatcattaatcaggctgcaggccaaattgattgctcgcgtaattttctcaatccaccgtatatttttcttcgagactggttggggctgacagatcccaatgcggctgtttatacctttgccgggcatgtctttaactgggttggtgttacgcacattatcttttcgatagtgtttgctgtcggttattgtgtggtcgctgaagtatttccaaaaattaaactctggcagggcttactggcaggtgctttagcccaactttttgttcatatgatttcattccctctcatgggactgacgccacctctgtttgatctcccgtggtatgagaatgtttctgaaatttttggacatttagtctggttctggtctattgaaattattcgcagagatttacgaaacagaattactcatgagccagaccctgagatccctttaggctcaaacagataatgcattgaatgataaaaatggcgcaaatacagcgccattttataggttaaaaacattgctttttatattctgattcagatagtcagtgagtatatcgcgctacttcaggatgatgtagatccgaagaacgctacagaagagaggcattgttgctggcaaatagaagaagtatcgggttttgttacccctgaaaaacgaagccccgctattatcgctggcggggcagtgcaattaattattgtatgtttataacggtgtcagcccgtatttagcccttgcacgattgcaagcctcattgacgactccgttctcaccagacatggcaaattctctgcatgtggacgatcgatttttatatatcgtgcagcaggcatttttgcccggggttcctgcaagggcaatacatcgggggtttttctgattggtaccgctcatgcatcggtgaaaaggggatatttgttcagtgagcctggcgggaatagtaccgccagcatcgtcggcttcggcccagtaaaaagagacgcggaaaaatgcacaacaggcaccacacgtcatgcatggattcagattgctcataattcaccagtacagctaaaaatcgtaaagagaacagcggtacatcgtatgtaagaacgtaccgcggttggctggggaactttcgatagtgygagtattgaatgatttccagccgttacmgattttacgtrctaattmgtgawyaaaccactcgttagcaggctgcctgatacctttccgtgtctcctgaacactatggtgtgcatatgagaaagcccatcgttacaggtgatattgacgatcgcttccacatcatttaaacgatttttggggctctgaggtggaattcttccctcgaccgatggataagtcttagtccgccgaagggggcttagccggacaggaatcgctaatcttaatgaatttgtcgttatagaccagataatgattccccggctgacgtaactcaggctgatgaaccacgtctcccggacgtagataccaggcatcgccttcctcttcggtcgaatcacatcctggcttaatcagtagcttaaaccatgtgttgccagtgttacttaccgttcctgtcaccttgtcgaaggaccatttaaactgaacctgacgtggtcgtactaccagaatggtatccatcaccaccaccggctccgtgctgacctcgccgccggttgggctacgtcttgtctggttacgagtggggacttcgcgaaatgagacccggtagtagcgctcgcggttatcccgtggaccatgatagtaaaatttaaaatactcgctctcaccagcctgcaacgccagttggcggggggcgaaaagcagttcaccatccaccggtcgggtgcgcaattcactgctgcccgggctatcaatagcactgatggcaatacggtatatccgtgcgcttttgttgttattcactacacgtttgctgacaaagtcagtctcggacggcagcgaaaatgtcagattgccgaccgaaatcgcctgtgtcaaaggtgccgccagcatacagaccgctgtcagcagggccttagttaatgttacgccacgtcgcctgaacatgaatctctcctgaagcgctgacttcgccaaaccagccgttatcatctaccgtacgcagcgaaatggcgttatccattggaatcgaaaatttgactgtggtcttatccatctgccccacttcgccagagatatcagtccacggtgtggtcaaccacagcgcatcggtcatatcccgccagctatcatcgcacccggcatcgtaggtttttgtagctccgttgcgggtaataaaggaaagtgtcgccgggaacggtactttcgccttaccgtcatcggagctgaagacacaataggagcgcccgccaatcacctgcgcgggtccggtcaccttgatcagcacttcgtcggcagctgttttaccgctggtggttacgatatagccgaaatcgagtgccgactcgccgctgccaacatatccctcccgcgacggtgtctgagtatattcatcggagataatactgatgctgaaatcacggggtttgataatcagcgtgttggaggtagaaaattcataccagccagactccggtgatgtggtgttctgaaagcgaaagttgaatagatctttggtgttgatatcgctgatcccgaggttcaccatctgcttaaagaagttgctcgagaagaaaacatagatcgagtctgcgctcttcatctcgttgaaggtgtagtaataggcggtattgctcaccggtttccatgaactgccattcagactgaactgcatatcgtacgccccgacggccgaggctaacgacgagttggcgatcgccgggaatatatggattgaggtgttgctgagtccgtttgtttgcagggtatagttgaccatcttacaacttaatcctgaaaggctgccgatggtctgtgtccggcagtcggcgttcccttcgcccagagtcggtactccgtcgctgttgataaatacctccgccagcgagtgggtatttattaaccgcagatttgctgctttcgtatgggtgacgttgcgaacataccagttgccggaggcctgatccttacagcgtgcgccgctgctggcgtcatagttcacagaggtctggcaggcattgatggtcattgtaaagctgctgccgacgggcatttgttgcagatactggtaaaacgcgtctgacaacatgccgtgcatccacttcgcgccgccgctggtcaccgtcgcgccataaaatccactggcgtcggtggtttgcggcaggataagactggtggtcatattacacccagcgtaccagttgatgcagcgcaagccagttaaaggagatgaaactggtgaattttccagccacatatcaaacttccagttggtataaaggccggtgttgtaaccgttatcaatgtagccgaggctttgctgatagatggttcctgaaccagtgtattttaaaccggtccagcggttggcaccggtcaggcgcggatccagcgccccgccaggagtgacgaaaaagttgtcgtctgagttgttttcgacaaacacaaactcgcgtgccggtgcatccgcccaggttgttttgctcactgccgctctgagctcagttactggccagattagcgcgaaaattatcatcgttattagtaggttaactctcattctcttctcctgtctgcgtcaccgccgcccacgatgagaggccgctgcagaccacatcaccgacccagacggcaccgcgcgcctggttgagttccagtgccacttcgcaggttttattgccactgtagcgaaaatcgatagtgggatatttcttatccacgtccatgacaaactcgccgttttcatcggttcgggttcggccgatatggttgttaatccgtgcgttagccagcagtgtgccgtcttccgcacggatacgaccggagacggtaaccatctgcttcacctctggctcaatgacagcgacattgcctggatagagagtcagatggcttttgcggccgctgacgatatcgtagctgtcgagtgagtttttgctgttctgtaactccacctcatatcttccatagggagagagcgggagatagttacgcttgccgttaagcgggaaaatccgcccgttgattttggcgctgatctgaccgtcgtcctccagcccggtgttgaatatcaccccagcgttgccatcagtccgcccgctggcagcaatgtttttaccctgccagccgacgctgccattggcggtcaagttggtattgacgtagccgtccgccgcgctattgacgttcagcgttccgctggcgtaacgagcgtcgaattgtgcatacgccccaccgctgagggttttgtcatcaccggtatcgccggagatggcacgtgacagattggcaccaacagtgcgaatggttccttcatcaaactgtttgcgtgctgacaggtttgccatggtgtagccgttttgatgagtcatccctgcgctaaaccagttgcccagtggtagcgagagatcgagagcgatatatttccctgtattggcgttgctgtcgccgttgttatagcgctgaataccggcccgcaggccaagcgaaccaaaggtaccgctgtagacattttgatagtaatctgccgtgtaataatggctgttgtaacggcggtcatcattgtagctgatgctgaatgtgcccagcttcgaccacagtgagttcaggttgagtgtgccgccgattgcacggttgtcggcatcgctacgtcgcaattgattgccaatgcgggttttttcctggttaacccacagcgaactaaagcctcccggtagagtggcgctgatgctgccgatgctgctccatgagctgtcactggccagcatattttgcaggttaacgttgatcgccccccaagcggcagcgtcagacgggtttcacccaccgcctgattatcgtatccatatcccgttgccgcccagctaagcgtactcaatgagccggaggtcgaggcacctgctagccaactctctttagctggtcgcgtctttttcccgttttccgaccagcgatccatatgaaagctaccgccccatacctgccacgccagtggtgcaccgacgccgcgcccccggctaaacagcttattgacccgctgggtgcgtttgctgatcacgcgaccgttaacgatcacctcaacttccacatcgtaaatcccgtacggtagaccccgggtatccacttcatgattgcccatagtgaagttctgaacgcttagtagccgcccatcacgggtgagatgtacttcgcccgccgccggtaaaaaggcgatcactggcgtggctgactggctgctgtcgaagatggtggagctggcctggtttccccaggaaaggccgtaaatcttccctgctgaaatggcggtcatcggccctaaggactgcaagttccaggtgtcgagcattccaccggcaaatcggtgaccggcaaaatcgcgttcatacatcgctttatataattcactgtcctgttgaccgctaccgatcccgtacagcgagccgtcgagcaccacatgatgttcgcgcagcgcagtaacgttattcagcgacagatagctggatgtgttgctcccgccgttacgcaactggttgttatagacgcccaagttatagctcagattactgctgagggtgttaacactggactgcccgatgtcttcgctacgtgagcgtagtacggtgcccagcgcttcgcgcttgaccaccagctgcagcagcagttggcgcaagctgagatccagctgcgcgttgtcagtcagggggatggtaagggcctcattgaacggggcgttcgccagagccatcagctgctgtcgagtttgttcgctgacactggcgttatcttcactctcttccagctgtattttccggatgcgtagctgtccatcatccagccagataaaagcgctgccgattcgctgatcgtcctggcgaccctggctaccggcgagatgaatatagagcgggacgctcatgccgtcctgaagcgcctgactgaaggcctgcggaataatcaccccacctatttgctgcgcacttatgtcagcagcgctggcatcgggttgaacgaacaaaaagaccatgccgaaggcaaactgggctttcagtcctggggagaaccgtcgtaaaggcattgtcgttatccatctgcacagctatctatttcacgggaatgaacttatcaccctgccaaagtgcaacccgtcctttgttatccgccgtgtccacgcgggtaaaacgacgcgacttgcctggcatcaggtagtaattctctttacactccttaccattggcggctttcaggcaggggccgtaagcgaggatccgcagcgtcgcatttcctgtatttgtcagggagccgttggcgtactgaaagtggtagttcgcctgacgaggggcgacgaccagaatggtgccgatgcgggcggaagcagtggccacagcgctgcggttggcattatcgcgctgcgcatcactgagggcctgatcaaaccagacaatgcggtagtagcgctctttttcatctgcgggtcccttatagaagaagcggatcacttcgctggcttgggcgggtagcagcaagctggcgggagtgagtagcaactcatccggcttgtccattgagataacctgcccgtcgtcaagcggtgaagagagccgttcgagacggatattgataaggcgaccactgtcggtactgtttttgatcgttttgctcagcgtgctgctgtcactgttcataaacgatgatatatcgccgacatccagcgcctgggccggagatattccggaaaacagcagagcgagaggcagaaggtgctttttcataacaattccgtccaggaataaagcaggggggctacccctgctggtacatcagagagattaactggtccaggtcgcgtcgaactgtacgctaacgtcgccgctccagatgccttccggtagagtgctgtaatctgttactgcggtggtaccattggtggtaccgctgatgatggagaaggtgaaaccatcctgtgcggtggtacgattgctggcattgtaaccgttagccagcgggctaaggttgccgcccagtacgccgttggcggtatcgatcatcacggtatcgccagttttttcgactgccgcgccgttataatccacgcccacattcagtgtggaacctgaggtatccaactgggttaatgtgttggtgataagacgtgaggtcagtttaaaggcggtagccgttgagtcaccctcgatagccacgtcaaatagacctttctgtgagttaaaacctttaatgccttcggcatactggaacgccaggctaccgagtggcgtcacaaccagcttactggtggtgtcttttttggctgttgccgaccaggtcgctacagcctgagctgttacgtcagcagcctgcgccacacccatgccggtaaacaccgttaccagagctattgccagaaccttttttttcattgcatttcttcccgagttgaattgaggacgtgatgtcccagtgagtcattttttaaaactaacttgcctggagtttactgaaccaacttatatatttttgagtacagcttggcctcagcattacgccgatgggtatacactgtcttcacactacaattttcaattctggcaatcgatttaggttgcattccctgggccgtcatgcggataatttccatttcccggtccgtgattttatctttcttaatatcttttctcaggaacctgccattaatcacataggccagttcttttctaatatcacgactcagtcctgcgtataccacgcccctaatattgctgttgtaataccaataatttgctaaggcttctgactttctggccgcaatcaatacgacctgtttcccctttaccgcggataaccattcattatcacggtttataaattcagataaagaatccgtattgagattgataaacacgaaatcttttctaattttctccaacgatagataaattaatctgtcgatatccacaatcagttcagatagtcctttatagaagtaggcgtcatggggagaccagatgtatttatcagaacggttttgacattccatatggtttttaacctcatagtccctgctgtaatcactttgccatgtcactactttccaaacctgtaatttttacaggtgcattcagtttccttagtaaaccggaagtaaataagatacgtagtacatatcaataaaggttaaacgagattaagtttaattattttcgattgggcttaaatttatgttttttcccgatgagtgtcaatatgtgaacggaaaaggaattcaatggttaagtcaatatttagaaaaactgaaaatattgcttttttgataagaagaaaaagacatttggtttcataaggttattggcaatataacgttcaattcttacttgcattttatattggtcaggaactttgccctgaagtgttaggaatagtcttaatgcgctgtgtgatggactagtaaaaaaacaagttttaagggtaagggatagaatataaaactataatgagctgtcattgaagatgatttgccaatcagtaagaaattttaatggattaacatgccgcacaaaatggttataggtgttcattacaataagtgatggaaaattgaacgggcgtatgtacgtcatctgttcggtaagcccccaagagccagattaagtgaagttaaacgaaggctgccagctgtcacaggaacgatggcctctttgtcagggcactgagtgcagttatctgtgcgcgttactctaactggcactcgaacgtcggcgacggggttaccggtggatcagactgttcctgtggcgtaaacgtttttatgttagtaccaacagatttaccacatttatcatcttaacagtttgagtgaaaatgcagctgcgccgcaaagggaggagactgagtggcgtgttcagtctaaaagagagttgatgccagcatacaggggcgaagctggtcaacaagtcaacattaagataatggaatattcggagagaaacgtcaggcagttggcctcaaatgaacaggaggaatatatccccaggaaaattaatgttggtgttataaacacaccaacattaatccgatctgattattaatcagacaaatatcgttaatccgtcgaattttgaatcaacgttttttcttacgaccctgaacggccttaaaacgtggattagatttacaaatcacatatagccgtccttttcgcttcacaatctgacagtctggatggcgttcttttgcggtacgcagagagttaaggactttcatcatgccccctttttcgtgctaacaaaacgaccaaaacgttgggtgaaccgtgcaacatttccttctgatgccactgttctcagcttccctgtatagaacgggtgcgatttcgaagagacatcaattgttacgtatggatacgttacgccatccagctcaatctcacggtctgttttgatagtcgagccgattttaaagtactcatcaatactggtgtcgtggaacaccacagtacgatactcaggatggatattgggcttcatcatttttacctgttatgttataacataaccataaagatacatgctcatccggatcatttcaacacccaatccctgtgaccattagtggtatgtggaatttccgcaacggggaagtctggcattgttagcagccgttggcgacgctcccataaacgcctggatgagtgattgatgatggtttcgctgagagtatggatttttcgacaatggaggttatctccactttactggccgatgatttatcgcagtatgattgattacctgacagcgtgtattcctctcccacggatataataattacttacaaaaagggagaggatgcatattttaaatatcactgaagtgaacagtttattgccgttattaatagaaatggagaaataaataggcgtattctacaattgcgacaaaaacaacgatattaatcagtttatgactgatttgttgtactttattctctttcattggtacttcctcgctttaaaaaagagtgcacttcgtaagtgcccttatataaataacgagtttggtcaaccaattttttgacatgtatcacaaatttgaatagatgtattacatcggctatcttttattgcaccaacgtcattgatatatgtcgcctgaagtcagttccgggaatgagtctgatctcaagactggcccagtccgggcgttgattggtgctgaggagtatatcgcatctcatcataatgtcgtatctcctggggtgttatacaagatatcgttgttggtaacctgggcgaggaattgagttctattaaaccgtcaactatgccagatacatactggattacactgcaggcacgccttacgagagaacgtgccgcagtgacgggttaattatctgaaagaatttgcgaggctgtatcggttactcattggtttgatagttttactctcgggagagtaatagatatttaattcattaacggaaaccagtcagttcctttcgatgcctgaatttgatcccatagtttatccggaatggttaattcatgaacaagttgtgttatcgttcatgagaagcataacgtaaagggaaaagctcgattagacggcaggatttgtcaggggttatgaacgaaattcataaatctgtttgagtgttgcgatgggtagtgcaagttcgatatctccgcaatttacagtctgatgaatgaaaatgaatatccataaaaaatatattggtttatcctggcgtatatacctacttcgatgtattgccaatcgtggtaaattaaagacaggtcattattattcactctgaataatgaattattcactgtccgcagagtaagaaatataacttaggtatctatttaatgacttgcacaaaaagctaaatttttacccataaataaaaatataatcccgcgcccaaccacctgatgagtggctacaggcactggatatattaggtggcggtgtactttcttacataaaggtatttccttttctgcggaaaaggaaaccgggaaatccctggtttttctgacaagcagacgccattatttgtgtctgcctatgttcgttaattcgttcatcaggaaattatctcaatgtcacgttataaaacaggtcataaacaaccactatttcgttattcagttctggcccgctgcgtggcgtgggcaaatatctctgttcaggttctttttccactcgctgtcacctttaccccagtaatggcggcacatgcgcagcatgcggttcagccacggttgagcatggaaaataccacggtaactgctgataataatgtggagaaaaatgtcgcgtcgtttgccgcaaatgccgggacatttttaagcagtcagccagatagcgatgcgacacgtaattttattaccggaatggccaccgctaaagctaaccaggaaatacaggagtggctcgggaaatatggtacagcgcgcgtcaaactgaatgtcgataaagatttctcgctgaaggattcttcgctggaaatgctttatccgatttatgatacgccgacaaatatgttgtacactcagggggcaatacatcgtacagacgatcgtactcagtcaaatattggttttggctggcgtcatttttcaggaaatgactggatggcgggggtgaatacttttatcgatcatgatttatcccgtagtcatacccgcattggtgttggtgcggaatactggcgcgattatctgaaactgagcgccaatggttatattcgggcttctggctggaaaaaatcgccggatattgaggattatcaggaacgcccggcgaatggttgggatatccgcgcagagggctatttacctgcctggccgcagcttggcgcaagcctgatgtatgaacagtattatggcgatgaagtcgggctgtttggtaaagataagcgccagaaagacccgcatgctatttctgccgaggtgacctatacgccagtgcctcttctgacactgagcgccgggcataagcagggcaagagcggtgagaatgacactcgctttggcctggaagttaactaccggattggcgaacctctggagaaacaactcgatacagacagcattcgcgagcgtcgcatgctggcaggcagccgctatgacctggttgagcgtaataacaacatcgttcttgagtaccgcaaatctgaagtgatccgtattgctctgcctgagcgtattgaaggcaagggcggtcagacactttccctcgggcttgtggtcagcaaagcaactcacggactgaaaaatgtgcagtgggaagcgccgtcattactggctgaaggtggcaaaattaccggtcagggtagtcagtggcaagtaacgctcccggcttatcgtccaggcaaagacaattattatgcgatttctgcggttgcctacgataacaaaggcaatacctcaaaacgcgtgcagacagaggtggtcattaccggagctggtatgagcgccgatcgcacggcgttaacgcttgacggtcagagccgtattcaaatgcttgctaacggtaatgagcaaaaaccgctggtgctgtctctgcgcgacgccgagggccagccagtcacgggcatgaaagatcagatcaagactgaactaactttcaaaccggctggaaatattgtgactcgtaccctgaaggccactaaatcacaggcaaagccaacactgggtgagttcaccgaaactgaagcaggggtgtatcagtctgtctttactactggaacgcagtcaggtgaggcaacgattactgttagtgttgatggcatgagcaaaaccgtcactgcagaactgcgggccacgatgatggatgtggcaaactccaccctgagcgctaacgagccgtcaggtgacgtggttgctgatggtcagcaagcctatacgttgacgttgactgcggtggactccgagggtaatccggtgacgggagaagccagccgcttgcgatttgttccgcaagacactaatggtgtaaccgttggtgccatttcggaaataaaaccaggcgtttacagcgccacggtttcttcgacccgtgccggaaacgttgttgtgcgtgctttcagcgagcagtatcagctgggcacattacaacaaacgctgaagtttgttgccgggccgcttgatgcagcacattcgtccatcacactgaatcctgataaaccggtggttggcggtacagttacggcaatctggacggcaaaagatgctaatgacaaccctgtaactggtctcaatccggatgcaccgtcattatcgggcgcagctgctgtaggttctacggcatcaggctggacggataatggcgacgggacctggactgcgcagatttctctcggcactacggcgggtgaattagaagttatgccgaagctaaatggacaggatgcggcagcaaatgcggcaaaagtaaccgtggtggctgatgcgttatcttcaaaccagtcgaaagtctctgtcgcagaagatcacgtaaaagccggcgaaagtacaaccgtgacgctggtggcgaaagatgcgcatggcaacgctatcagtggtctttcgttgtcggcaagtttgacggggaccgcctctgaaggggcgaccgtttccagttggaccgaaaaaggtgacggttcctatgttgctacgttaactacaggcggaaagacgggcgagcttcgtgtcatgccgctattcaacggccagccagcagccaccgaagccgcgcagttgacggtcatcgccggagagatgtcatcagcgaactctacgcttgttgcggacaataaggctccgaccgtcaaaacgacgacggaactcaccttcaccgtgaaggatgcgtacgggaacccggtcaccgggatgaagccagatgcaccagtgtttagcggtgccgccaacacggggagtgagcgtccttcagcaggaaactggacagagaaaggtaatggggtctacgtgtcgaccttaacgctgggatctgccgcgggtcagttgtctgtgatgccgcgagtgaacggccaaaatgccgttgctcagccactggtgctgaatgttgcaggtgacgcatctaaggctgagattggtgatatgacagtgaaggttaataaccaactggctaatggacagtctgctaaccagataaccctgaccgtcgtggacagctatggtaacccgttgcaggggcaagaagttacgctgaatttaccgcagggtgtgaccagcaagacggggaatacagtaacaaccaatgcggcaggtaaagcggatattgagttgatatcaaccgttgcaggggaacttgaaatcgcggccgcggtgaaaaactctcagaagacggtcacggtgaaattcaacgcggatgccagcaccggtcaggcaaacctgcaggtagacaccgccgttcaaaaagtagcaaacggcaaagatgcctttacgctgacggcgaccgttgaggataaaaatggtaaccctgttccagggagcctggtgacctttaatctgccccggggtgtcaagccgcttacaggcgataatgtctgggtgaaagccaacgatgaggggaaagcagagttgcaggtggtttcagtgactgccggaacgtatgagatcacggcatcggcggggaatagccagccttcgaatacgcagactataacgtttgtagccgataaggctaccgcaaccgtctccggtattgaggtgatgggcaactatgcgctggcggacggcaaagccaaacaaacgtataaagttacggtgactgatgccaataacaatttggtgaaagatagcgaagtgacgctgactgccagcccggcttcgttaaacctggaaccgaatggcactgcgacaacgaatgagcaagggcaggctattttcaccgctaccactactgttgcggcgatatacacactcaaggcgcaagtgagtcagaccaacggtcaggtatcaacgaaaactgccgaatctaaattcgttgcggatgataaaaacgcggtactcaccgcatcatctgatatgcaatctctggtggcggatgggaaatcgactgcgaagctggaggtgacactgatgtcggcaaacaaccccgttggcgggaatatgtgggtcgacattcagacgccggaaggggtgacggagaaggattatcagttcctgccgtcgaaaaatgaccatttcgtgagcggaaaaatcacgcgtaaatttagtaccagcaagcctggtgtctatacgttcacatttaacgccctgacctatggcgggtacgaaatgaagccagtgacggtgaccattaccgcggtggatgccgatacggcaaaggacgaggaggcgatgaaataattttaagaatatgaaagtaacattctaataaacaataatggcgttgacatcttcaacgccattatttattgaatttcctgacagtagtctcgttataaattcatttagatatagcgaaaactaaaccggacgaacggggataaaaatttcgcaaacaacatcattgctatccttttctacgaaatcttcattgtaataaaaccgctcaatatcactgccgttcactctggctaaccccctggcgggtaattccatcagatagaggtttcgcgcccattcagggtagtgctcccactcaccttcatagcggaaagaggcatacagtcctcggttaattgtccactctttcggcatctctgaatcggttggtttgcataccgtaccagcaaaagtttcaaccgtgagcaaatcgaccgattttgttgacggttcaaacgtggaaacgaaatagatatccgtcttaaaattcttcatacatctggctaaatgatgacgtcgtagtttgacttcttcatccggtgatttattcgacacttcaatgtcatatttaaatgagttgccaaaaataggtgtctcaggaaagttgattaatctacactccgtcttttgctgttgacgtattaaaaaagaagggaagatatttgcgagatcccaataatcacggtggcggtattcacggggagagcagccgaataactttttaaattcgcggctgaatgactgctgtgaatcaaaatgcaaagagagtgcaatatcaagcatagatttcgcggtgagccggacaagaatggcggcacgacaaagccttcgtttgcgaatgtattctcccaaaggcacatgcatgaaatttcggaacagaagctggatgttgcgtctgctgtagccagatttctgtgcgatatcttcgattgaaatagggtgctcaagattgcactcaatccactccaggagctgctgtagaatcttctgcctgatcatctcattctccgttaattctttgtcatatcgcacattttcgttataccctgggccctaagtgtatcaaaaatagcaagggcgaaggcaaaagcactggtagcgtctgcttcgttgtccccgaaaatagagaggtttcagtcctacattattaatgaattttttgcataagtgatatcaaaatccacatactactttgaggttacgttttaacgtagactcattgttcatgcctaatggagggactgacagtggaattttccgtatagtctgcttcagagtattgcagatgcccatcaaaaatcgatttctcactgacagataaagaaatggcacaaattagttcgcttgatttgggttatgttggggagtcggtaaaacattttaatcctgaatttgttcgtggttgtcttgctgtaaaaatacatgattgatattaatcatgtattttacctaagacgacaaaaaccttttaacagggagtgatattgatcttcactctgtcatatctccggtaatatggcgtcaggcttcatcatcagaaagggggcctgacgcctgaaaaagtgaacaacagacagtgttcggattatcaatattcagtttttaacgttgaactggattcattactgcgttgtttaagaatttcccgcgccgaatctgccattatcatgactgcacctgccagcatcagagtatctttcaataccaggcgaccagcaccggataaataagggaaaccatgatgagcgtcacccaatgcgggtacccatgcctccggggtggtgattaaaaatgagagtgttaccaacggtgtggtaaatgccatcagccctcccaataaacctaaccagcgattgacaggattagccaaaaccagcagagcaataatcacctccacgacgccaagaccgttggaaaaaccataggtattattggccgattgccatgcccttgcttctggtttgtattcgccttcgtgagtcagatactgtttatagtcttccgggtgttcataaaagaacgacattagtggactgtttgcgacgaatggtgtaatgctgtctgcctcgtaagggacaaactttaataacccaatccacataaaaacaattgcaatactcagacgaatcaatgtcaggccaattttatctccccgacttaacaggtgcaggtatttttccattgtgaacatccttatttatacaatactgctgttgcggttgaattattatcaattcgcatcgatgtgactttccaggatgaagcattatattttctggctatatcagcaatggcatcctccagaactgtcggtgatgctgatactgacgagacgctgatatgtttcagaattattttatcatctgcattggtggaaaatgccataacgccagataatagtgttgcaaataaaacagattttttaaacatataaaataccatcaatgaagtgattaagaagttatagagtaacagggaattaataagattcttttctctgagacgccagaatatttgttctggcgtctgattttgagtttatttgactaatgaaaatagatcattgagtgattcgctcatcgacggatgagtaaatatctgatcgcgtaatatgctataaggcagcccggcatccatcaccattttcactatattgatcatctcgtgggagtcaacacacagcagtgatgcccctaatatacgttgggttttattatcaacaatcgcttttaataccccacgagtatcattcatcactctggcacgcggaattgcagctacaggcaatgtcaccacctgaatatcagcaccactctctctggcctgttcttctgtcataccaaccctggacagtggcggtgtcatgaatacggaataaggcacatttttccgatcatcagtactacgtctgccttctcccagcaactcatcacgcacaatgcggtaatcatccagtgaaatataagtaaattgcagcccgccggtaacatctcccatcgcccaaatattgtctgcggtggtatgtaattgcttgtcaacgacaattgccccgcgctcgtttactgcgataccggcattttctggatgtaacgaagcggtagccggttgacgaccggaagctattaacagtgcatccaccgccagttgggcgtgctcgctatgcacttgcacttgattttcatggtgactgattcgctccacatgggcattgaggataatatcgacgccctgatcgcgtaaaatcgtcgcgatattatcagcaatatcccgatcttcccgaggcaaaaacagcgaagctgcttctaaaatggttaccttgctgccaaaattagcgaacatagaggcgaactcaacgccaatatatccgccgcccaaaatacctaaatgcccaggcaattcttttagattaagtaatccggtgctgtcatatactcctggcgtggtggtaattccaggaattggcggaaccacggtttgtgcaccggtattaataaaaattttctcgccatgaatttccagatttgcctcaggccgatgaacacgcaggctatgattattgataaactccgcctggccgtcgatcacgtcgatattgggcatatccgcaagattatgaaaattcttattacgtaaaaaattaaccacttcatttttacgctgtatggcacggacaaaatctgtgtgctgctgtgcgtcatgaaccaatgttttggttgggatgcagccgatattaatacaggtcccgccatacattgcatttgattgttcgatgagagccactcgccaacctgcttttgccagcgtgacggctaatgtttttccagccttgccaaaaccaataataactgcctgatatttattcatgatgatttcctgtcgaaacgcgttcatttgacatcatgactatagacgcaaaagagcaaataccatttcttcacaacgcttgatattttgtcttatcgtctggtattttctttttcttaatcagaatcacaaaacaaaaatcatgattaaccatttgatggtattagattagttatttactaagattgttggtgtttgtaatcaaaaaccactcaggagtctgatatggatgcccttagccgtttgttgatgcttaacgctccacaaggaacgatcgataagaattgcgtgttaggaagtgactggcagcttccacatggtgccggggaattatcggttattcgttggcatgcgttaacgcaaggagcggcgaagctggaaatgccgacgggagagatttttacattacgcccgggaaatgtggtcctgctaccacaaaattcagctcatcgcctgagtcatgtcgataatgaatcgacctgtattgtctgcggcactcttcggttgcaacattcggcgcgttattttttaacgtctttgccggaaacgctgtttttagcaccggttaaccacagcgtggaatataactggctgagggaggcgatcccgtttttacaacaggaatccagatcggcgatgccgggagtggatgcactgtgtagccagatctgcgctacattctttaccctcgcggtgcgtgagtggattgcacaggttaatactgagaaaaacattctcagtttgcttctgcatccacgtcttggtgcggtaatacagcaaatgctggaaatgccaggacacgcctggaccgtcgaatcgctggccagcatcgctcacatgtcccgggcaagttttgcccagcttttccgtgatgtttccggaaccacgccgctggctgtattaacaaagttgcgtctacaaatagcggcccagatgttttcccgggaaatgctccctgttgtggtgatcgctgagtcagtaggctatgccagtgaatcatcttttcacaaggcgtttgtccgcgagtttggttgtactccgggagaatatcgggaaagggtcagacagcttgcaccctgaataaaaccgccagaaatcagggcaaagataatccgcattccgggagttgtgagcctttcaactatttctatttccaacggtggtttgggctttatatatttttttctgatggactctagctcagtttttaaataaaaatgcaaactaaattgcttcaattaaataaaaccccgactattacttgatacgtgattattgtcggtgatttttttgtacaccatcagtgtatatctcaataacccctgaataagtagctctgaataggtataagggatgtagcctttttaaatggatttcttatgccaaaaatgaacgtcgatttccccataaaatgtgagcgatgccgaaagaaataaaattagttattgcatttgaagtttggatgaaagattatcatttgtcatacaaatgaggggtggtatgttgctagccaattaaaaaagaacgccatatttattgatgattgatcccccggtgggggggaaacatcgggcataaatgggcatgaagtaatggagtattagttgtgaatgtcaatttctttgtcacctgtattggtgacgccctgaaatcaagaatggcacgagactccgtgctgctactggaaaaactcggctgtcgcgtaaatttcccggagaaacagggatgctgcggtcagcctgcgatcaatagcggttatatcaaagaagcgattccagggatgaaaaatctgatcgccgcactggaggataacgacgatcccattatttcaccggctggctcttgcacctatgccgtaaaaagttacccgacgtatctggcggatgaacctgaatgggcatcacgtgccgaaaaggttgccgcgcgtatgcaggatctcacctcttttattgttaataaattaggggtagtcgatgtaggtgccagtttgcaagggagagctgtgtatcacccatcttgtagcctggcccgtaagctgggagtgaaggacgagccacttacgctgctgaaaaatgtgcgtggactggagctgttgacctttgctgaacaggatacctgctgcggatttggcggcacgttctcggtcaaaatggccgaaatatccggcgagatggtgaaagaaaaggttgtgcacctgatggaagtccgccctgaatatttaattggtgctgacgtgagttgcctgctgaacatcagtgggcgattacaacgggaagggcagaaagtcaaagtgatgcatattgctgaagtgttgatgagccgctgaggatataaagatgtcgatcaaaaccagtaatacagattttaagacacgcatccgtcagcaaattgaagatccgatcatgcgcaaagcggtggcaaacgcgcagcagcgtattggggcaaatcggcaaaaaatggtcgatgaattggggcactgggaggagtggcgcgatcgggccgcccagatacgtgatcatgttctgagtaatctcgacgcttatctgtaccagctctcagaaaaagtgacgcaaaacggcggtcacgtctggtttgcaaaaaccaaagaagacgctacccgctacattttacaggttgcccaacgcaaaaatgcccggaaggtggtgaaatctaaatcgatggtgaccgaagagattggtgtcaatcatgtgttgcaggatgctggcattcaggtgattgaaaccgatctgggtgaatatattctccagctggatcaagatccgccatctcatgttgtggtcccggcaattcataaagatcgccatcagatccgtcgagtgctacacgaacgtctgggctatgaggggccggaaacgcctgaagcgatgaccttattcatccggcaaaaaatccgcgaagatttcctcagtgctgaaataggtattaccggctgtaatttcgcggtggcagagacaggttcggtatgcctggtgaccaatgaaggtaatgcgcgaatgtgtaccacgctgcctaaaacgcatattgcagtgatgggaatggagcgtattgcccccacgtttgccgaggtagatgtattgatcaccatgctggcgcgcagtgccgttggtgcacgtttgacgggatacaacacctggctgacaggaccgcgcgaagcggggcacgttgatggtcctgaagagtttcatctggttattgtcgataacgggcgttctgaggtgctggcctctgaatttcgggatgtgctgcgctgtattcgctgcggggcttgtatgaatacttgtccggcatatcgccatattggcggtcatggatatggctctatttatccagggccaattggtgcggtgatttctccgctacttggcggctataaagattttaaagatttaccctacgcctgctctttatgcactgcttgtgacagcgtgtgtccggtgcgtattccgctgtcaaaactgattttgcgtcatcgtcgggtgatggctgaaaaagggatcaccgcaaaagcagagcaacgggcgataaaaatgttcgcttatgccaatagtcatccaggattgtggaaagtcgggatgatggccggtgctcatgcggcaagctggtttatcaatggcggcaaaacaccactcaaatttggcgcgattagtgactggatggaagcacgcgatcttcctgaagctgacggagagagtttccgtagttggtttaagaaacatctggcgcaggagaaaaagaatggataatcggagcgaatttttgaataacgttgctcaggcactgggtcgcccgttgcgacttgaaccgcaagcagaagatgcgccgcttaacaactatgctaacgagcggcttaccgcacttaaccaacagcagcgctgtgacgcgtttattcagtttgccagcgatgttatgttgacgcgctgtgagctgaccagcgaggcgaaggcggcagaagctgcaatacgtctgtgtaaagagctgggagatcagtcggtcgtgattagcggtgacacgaggctagaggaattggggattagcgaacgtttgcagcaggaatgcaatgccgttgtttgggatccggcgaaaggtgccgagaatatctcgcaggcagagcaggctaaagtgggtgtcgtgtatgctgaatatggtttaaccgaatcgggaggcgtggttcttttttccgccgccgggcgcgggcgttcattgagcctgctcccggaatcttctctttttatcctgcgtaaaagcactatcttgccgcgtgtagcgcaactcgcagaaaaattgcatcagaaagcgcaggccggtgaacgaatgccgtcctgcattaacatcattagcggccctagttcaacggcggatattgagcttatcaaagtcgtcggggttcatggtccggtgaaagcggtgtatctgattattgaggattgttgagagagatatgaagtctggacataaacctgaagaaggcatacgaggttgaaaatagcgtttaggacaacctgacttaaccccgttccgtcatggttatgctgctcttctgtaaatatcctggcattagtaatgccaggatatttacagtgaaaaagacaggcatccattcctgaaaacgggttcccttcccggtcattgtcacttcagctttatacaggcactctctatcagaatgctgtttattactacccagagttttgttggtattcatctaccatttttttgacaaggcaaaacattacagaaattacaatgcttagaaaaaatcccagagccaggcaaatggcagcagggtatttattttttatttctggtgagcttatagttacacagccatcaccgttcggatacaatgaccagttcctggtcaggtatatcatttttgtataaagctcactgttaattgctgaaggtgtttgtatctcatcgagaacttgcctgccattatggtattctgacgcataccatttgataatagacgcctgcacgcgagatatttccgcttcagcagttggtaaatctctcttatctcctgaccattccagctttatttctctgttcttgacatctgggctggtgtgaaaaaatgtagtaattcgctgtataacatcttcagtcattgtggtctgacaggcaaagttattattgctatcacagttaacaagtatgcctggtgttgtctggtttatttttaggctgtaactcacttttatattatctttattgatatacagaaacaacagcaccattgccatacagatagctataataaaaaggataacgcgaatctttttcttcagataaaataaaatctcaatcagatcgatatcctgtttgatttgttcacgcataatatatccagaaaataaaatctgtcgcagataaggttgtattaatagtctgtatcaggaatgttcgggttaaatatcagcaaaaagccagcatcatgaatactggatatgaagcatgagagttacctcagtgtttatataaggattcggtccccctctctggaacggtaactctcaatctgatcggttcctgcgttagttcacatcacgactcatttttcgctctcaccggcatcccatttgccacaaaatatcccgccgtgctcctcggcagcgcttcctgtccacgaatcatatccgctattttctcgccaatcataattgtcgtggcgttcaaattcccggtgataatctgcggcataatcgacgcatccaccacacgcaggccttctaacccgtgtacgcggccttcgccgtcaaccacggacatctcgtcgtaacccattttgcaggtaccgcacggatggaaggcggtttcggcgtggttacgcacgaactcatcgagctgttcatccgtctgacattccgtgccggggctgatttcgcggccacgatactgatccagcgccggttgatgcatgatctcccgggtgatgcgaattgcgtcgcggaactcctgccagtcctgctcgtgtgacatgtagttaaacagaattgccggatgctggtgcgggtcgcgggatttaatccgcacatgcccacggcttggcgagcgcattgagccgacgtggcactggaaaccgtgctccttcaccgcattcgagccgttatagttaatcgctactggcaggaaatggtactgaatattcggccacgcaaattcctctcggctgcgaataaatccgcctgcttcaaagtggttgctggcaccaacgccagtgccgccaaacagccactccgcaccgattttcggctggttccaccactgcagggcagggtagagggaaaccggttctttgcactcatattgcagatacatctccagatgatcctgaagattttcgccgacgccgggtaattcatgcaccagcggaatatcaaactccgccagcagttcagcgttgccgacgccggagcgttgcaggatctgcggtgaggcaatcgcgcctgcacataacagcacttctttgttggccgttgcgcgggttgggatggtgctgtcgccttccagccattcgacgcccaccgcgcgtttgccgtcaaaaatgatgtgatcggtcatagcgtgagtacgaatggtcaggttagggcgcgatttggcctgatcgagataaccgcgcgcggtactggcgcgacggccctgcggcgtgacggtgcgatccatcgggccaaaaccttcctgctgatagccgttgagatcgtccgtgcgcgggtagcctgcctgcacgcccgcttcaatcatcgcttcaaacagcggattgacgccgggtttggaggtggtgacgctcaccgggccatcgccaccgtggtagtcgttctcgcccacatcgcgagtctcggccttgcggtagtagggcaggcagtcgagataactccagttctccagaccgggttcttgcgcccagttatcgagatccagcgcattgccacggatgtagcacatgccgttgatcagcgacgatccacccaggcctttaccgcgtccgcactccatgcggcggttattcataaacggttcaggctctgtttcataggcccagttgtagcgtttgccctgtagtgggaacgccagcgctgcgggcatctgggtgcggaagtcaaagcgatagtccgggccgcccgcttcaagcagcagcacggaggtattcggatcttcagtcagacgggtagcgagaacgttgccggctgagccggcaccaataatgatgtagtcaaattgcaaataaacctcctggttagaatatggactggaatttagccatctcaacctggatggacttcacctgggtgtaactctggagcgtcatcacgccgttctcgcgaccaatgccggagtgtttgtagccgccaacgggcatctctgccggggattcgccccaggtgttgatccagcaaatacccgcttccagctgatgaatgacgcgatgcgcgcggttcaggtccgccgtcacgatgcccgccgccaggccgtagtcggtatcattggcgcggcgaatcacttcgtcctcagattcataagtgagaagcgacatcactggcccgaagatctcttcacgcacgatggtcatatcgtcgctgcaatcggtgaacactgtcggtgcaacccatgcgccgttatcgaagccatcgcctttcagtacatcgccgccgcacagtacgcgcgcgccttcctctttgcctttggcgatatagcgcagcacgttatcgcgatgcgggaagctgaccagcgggccgaagttagtttgcggatcgaaaacgtcgcccgcgcgaatgcgctcaacgcgcgccagaattttctgctcaaatgcggctttgcatttcgccggaacgaagacgcgggtgccattggtacacacctgaccggagctgaagaagtttgccatcatggcgatatcggcggcgagatcgagatccgcatcatcgaaaacgatcagcggtgatttaccgcccagttccatggtcacttctttcagggaagaggccgccgagttagccatcacttttttgccgctggcgacaccgccggtaaatgacactttggcaatgcccggatgctcggtcagatattgcccggtctccgcgcccacgcccggcaacacgttaaatacgccgtccggcaggcccgcttcgctgtaaatttcagccagctttaacgcggtaagcggggtaacttcgctcggtttgaaaatcattgcgttgcctgccgccagcgccggggcggatttccacagggcaatctggatcgggtagttccatgcgccaatccctgccactacgcccagcggttcgcggcgggtatacacaaaggacgtttcacgcaacgggatctggctgccttccagcgccgggatcagcccggcgtagtactccagcacgtccgcaccggtaacgatatcgacggttgaggtttccgaatatgcttttccggtgtcgagggtttccagttttgcgagttcgtcattgcgttcacgcagaatatcaacggcccgacgcagaatacgcgagcgctccatagcggtcatcgccgcccagattttttgcccctgttgggcactcttcacggcgcgatcgacatcctcacgcccggcggcctgcacggtcgccagcacgttaccgttggccgggttaatggtctcgaaggtgcgaccgctggtggcggaggtataaccaccatgtatataaagctgctgttctgccattcgggacatcacgtctcctcggttaatcggtgggtaaatgctgagtaataaagtgacgggtcagcgagtgtgcgagaggtttatccagcggtttgccgctcagtgccgcgcgcagccataatccgtcaatcagcgcggcaaggccgtagcccgcttcctgtgcctgttggcgcggtaactcgcggcgaaattcgctcaccagattcgacaataagcggcggctactgacctgctgtaaacgatagagcatcggctgatgcatactgctggcccagaacgccagccaggctttcatcgccgcactgctcacctgcgtttcatcgaagtttccgccaacaatcgcctgtaatcgctgctctgcactgccctgcggaagtgcatgtaatcgattcaaaaccgcgtcacgcagctgactggtgatatcgcgcatggttgcttccagcagaccatttttgtccctgaaatagtggctgatgatccccgtagaaacgcctgcacggcgggcgatctgcgcgatcgttgcatcgtgcatgcccacttcatttattgcttccagtgtggcgtcgatcagttgtctgcgccggatcgactgcatccccaatttgggcattttcgccactccattcatcagcgttgtttatctattaaagcggttattgattggacgttcaatataaaatgtgtcttaattgttacgaatttgattttaaatggtaacaataacagtggggatactggatgacagacctttcacacagcagggaaaaggacaaaatcaatccggtggtgttttacacctccgccggactgattttgttgttttccctgacaacgatcctgtttcgcgacttctcggccctgtggattggccgcacgctggactgggtttctaaaaccttcggttggtactatctactggcggcaacgctctatattgtctttgtggtctgtatcgcttgttcgcgttttggttcggtgaagctcgggccagaacaatccaaaccggaattcagcctgctgagttgggcggcgatgctgtttgctgccgggatcggtatcgacctgatgttcttctccgtagccgaaccggtaacgcagtatatgcagccgccggaaggcgcgggacagacgattgaggccgcgcgtcaggcgatggtctggacgctgtttcactacggcttaaccggctggtcgatgtatgcgctgatgggcatggcgctcggatactttagctatcgttataatttgccgctcaccatccgctcggcgctgtacccgatcttcggtaaacggattaacgggccgatagggcactcagtggatattgcagcggtgatcggcaccatcttcggtattgccactacgctcggtatcggtgtggtgcagcttaactatggcttgagcgtactgtttgatattcccgattcgatggcggcaaaagcggcactgatcgccttgtcggtgataatcgccacgatctctgtcacctccggtgtcgataaggggattcgtgtgttatcggaacttaacgttgcgctggcgctgggattgatcctgttcgtattgtttatgggcgacacctcgttcctgcttaatgcgctggtgctgaatgttggcgactatgtgaatcgctttatgggcatgacgctcaacagttttgccttcgaccgtccagttgagtggatgaataactggacgctcttcttctgggcatggtgggtggcatggtcgccgtttgtcggcttgttcctggcgcgtatctcgcgtgggcgtaccattcgccagttcgtgctgggcacgttgattattccgtttaccttcacgctgttatggctctcggtgttcggcaatagcgcgctgtatgaaatcatccacggcggcgcggcatttgccgaggaagcgatggtccatccggagcgcggcttctacagcctgctggcgcagtatccggcgtttacctttagcgcctccgtcgccaccattactggcctgctgttttatgtgacctcggcggactccggtgcgctggtgctggggaatttcacctcgcagcttaaagatatcaacagcgacgcccccggctggctgcgcgtcttctggtcggtggcgattggcctgctgacgctcggcatgctgatgaccaacgggatatccgcgctgcaaaacaccacggtgattatggggctgccgttcagctttgtgatcttcttcgtgatggcggggttgtataaatctctgaaggtagaagattaccgccgtgaaagtgccaaccgcgataccgcgccgcgaccgctggggcttcaggatcgcctgagctggaaaaaacgtctctcgcgcctgatgaattatccgggcacgcgttacactaaacagatgatggagacggtctgttacccggcaatggaagaagtggcgcaggagctgcggttgcgcggcgcgtacgtggagctaaaaagcctgccgccggaagagggacaacagttggggcatctggatttgttggtgcatatgggcgaagaacaaaactttgtctatcagatttggccgcagcaatattcggtgccgggctttacctaccgcgcacgtagcggtaaatcgacctactaccggctggaaaccttcctgttagaaggcagccagggcaacgacctgatggactacagcaaagagcaggtgatcaccgatattcttgaccagtacgagcggcaccttaactttattcatctccatcgtgaagcgccgggccatagcgtgatgttcccggacgcgtgattgtttttgcataaaaccgcgccatgtctgcatatggcgcgggaatcattgactcgctgtaaaaaattatgcatatattatatatgattgtcatgtcatatcctgaaattcctcttgtatcacttcatgactttatattttattaattaacgattttattttgtattagctgaatggattcagtcctatagagttatatatttattaataagacgattcttatatttggatacctaataagagttaccacttttaccgtctgtatattaaatgtattcctcctgcttttgtttatattttgagttgatttgagttcctggatacatataatgcgcaggtattagagactgggaggaatgtaatgataaagttaagagtgttaacttaaaataagttttcagtagtaacttgctattttattaccctctgaactacatactcagatatgtggttgccaatgctatgcaaaatttttgaatttttatatgcgatgaacagtaaccagaatggcatttaatgcgttgctgtttatgcaatcttggttttatttggatgtattgctggagattgtgatgaataaaatatatcggctaaagtggaacaggtcccgtaactgttggagcgtctgctcggagctggggagcagagtaaaaggaaaaaagtcccgggctgttttaattagcgcgataagtttatattcatctctggtattcgccgatgatgtcatcgtaaaccaggataaagctattgattttggcaaagagaaccagagcatcgattatcgtattacggtgactgacaatgccaatctggtaatcaatgcgacagatacttcccgtccgcgtctgactctcgcttctggtggtgggttggatattaccggaggaaaggtaactatcaatggcccacttaactttttgctgaaaggtacggggttcctgaatgtctccaatgctggcagcgagttatatgctgatgatttgtatgagtcaaactcaggcatgagacacgatcgcggctattttaatgtctccaacggcggcaaaatccatgttaagggcaccagccgtctgacctatttgcagggaaatgtcagtggtgaaggcagccaggtaaattctaaaaccttctttatgggcgtttacggcagttacggtggtaatcagtacctgtcagttaataacggcggtgaagttaatgccagtgagaaaattagcctgggttattatgatcaaaactccgatacaacacttgctgtttcggaaggtggtaaaatctctgcgccgactattagtttaagcaccaactctgagttagcgttaggtgcacaggaaggaagcgcagcgaaggctgcagggattattgatgccgaaaaaattgagtttgtgtgggcaaagacatccgagaagaaaatcaccttaaaccacacggataaaaacgcgactatttccgcggatattgtcagtgacagcgagggcctgggctatatcaatgcgctcaatggtacgacttacttaaccggggataactccgcctttagcggtaaagtcaaaattgagcaaaatggcgctttagggatcacccaaaatataggtaccgcagaaatcaacaaccgcgggaaattacacctgaaggctgacgatagcatgacctttgccaataagatttccggcaacggtacaataagtatcgacagtgggacagtggcgctgaccggcaataactatgcattcagcggatatattgatgtcgcttctggtgctgtcgcggttatttctgaagacaagaacatcggccgtgcggacctggatgttgatggcaaactgcaaatcaatgccaataaagattgggtatttgataacgatcttcaaggtagaggtattgttgaaataaacatggggaatcacgaattctccttcgatgagtttgcttatacagactggttccagggttcactggcgttccagaacacgacatttaacctggaaaagaatgctgagtttctgcagagaggcgggatcactgcgggtcagggaagcctggtaacagtgggtaagggcgctcactccattagcactttgggattctccggcggaaccgttgattttggtgccctgacagcaggtgcacagatgacagaagggacggtcaacgttagtaaaacgctggatttgcgcggcgagggtgtgattcaggtttctgacagtgacgttgtaagctcagtatcccgtgatattgactctgcgttatcgctcactgaagtcgatgatggtaacagcaccattaagttggttgatgcgcaaggtgcggaagttctgggcgatgcgggcaatctgcaattgcaggataaaaatgggcaaatcctctccagcagtgcccaacgtgatattcagcagaatgggcaaaaagcggccgtcggcacttacgactatcgtctgacgagtggggtaaacaatgacggtctgtatatcggttacggcctgacccagcttgatttacacgctaccgacagcgatgctctggtgctgagctctaacggtaaaagcgagaatgccgccgatctcagcgcaaagattaccggcagcggtgacctggcattcagcagccagaaggatcagaccgtatcgctttctaacaaagacaacgactataccggtgttaccgatctgcgcagtgggacgcttttgttgaataacgataacgtgttgggtaatacccatgaactgcgtctggcggcagagactgaactggatatgaatggtcacagccagaccgtgggcacgctcaatggcagcgccgattcactgctgagcttaaatggcggcagtctgacggttaccaacgggggcacttcaaccggttcgttaacggggagcggagagctgaatattcagggcggcacgctggacatcgcgggcgataacagcaacctgacggcgaatgtgaacattgctaattcggctaatgtcctggtaagtcatgcgcagggattgggtagcgcaaacgttgagaacaacggtaccctggcgttgaataatagcgctgaaaaaagagcggctgcgtctgtgaattacaccctgggcggcaatctgaccaacaacggtacgctgatgaccggaatgtcaggacagcaagctggcaatgtgttagtggtgaaggggaactaccacggtaataacggtcaactagtaatgaatacggtactgaatggcgatgactcagtaaccgataaattggttgtcgagggcgatactagcggcacgactgccgttacggtgaataacgctggcggtacaggtgcgaaaacccttaacggtatcgaacttatccatgtagacggtaagtctgagggcgaatttgttcaggctggtcgtatcgttgcgggggcgtatgactacactctcgtgcgtggacaaggggcaaatagtggtaactggtatctgaccagcggcagtgattctcctgaactgcagccggagccagacccgatgccgaatccggagccaaacccgaatccagagccgaaccctaacccgacacctacgccgggtccggatctgaatgtggataatgacctgcgaccggaggcgggtagctacattgcgaaccttgcagcagcgaatacaatgttcaccacgcgtctgcatgagcgtctgggtaatacgtactataccgacatggtgacgggtgagcagaaacaaaccactatgtggatgcgccatgaaggtggtcataataaatggcgtgatggcagcggccagctgaaaacccaaagcaatcgctatgttctgcaactgggaggcgatgtcgcgcagtggagccaaaacggcagcgacagctggcatgttggggtcatggcgggatatggcaacagcgacagtaaaaccatttcctcgcgaaccggttatcgtgcaaaagcgagtgtgaacggatatagcaccggcctctatgccacctggtatgccgatgacgagtcgcgtaatggcgcgtatctcgacagttgggcgcagtacagctggtttgataacacagtgaaaggggatgacttacaaagtgaatcctataaatcaaaaggatttaccgcttcactggaagctggatacaaacacaaattagctgaatttaatggcagccagggaacgcgtaatgaatggtatgttcagccgcaagcacaggttacctggatgggagtcaaagccgataagcaccgcgaaagcaacggaaccctcgttcatagcaacggtgatggcaatgttcaaacccgacttggcgtaaaaacctggctgaagagccaccataaaatggatgacggtaaatcccgcgagttccagccgtttgtagaagtgaactggctgcataacagtaaggatttcagcaccagtatggatggcgtgtccgtcactcaggatggagcccgaaatattgctgagataaaaaccggggtggaaggacagctaaatgccaacctgaatgtctgggggaatgtgggcgttcaggttgccgataggggatataatgacacctctgcaatggttggcattaagtggcaattctgatctgaataatgagtaaaaggagagagagccgaacgggagataattcggctctctgtgtcattttcttgcagccagctttatcagtcagagtgaagactcgcagatttagctggcgcacaagatttaatcaaggtgtgttcaatggcttcgcatgatttgagtgtttttttggaagagttcggggcaacggtgaatttgacgttgcctggtatcgtgtccgaaaaagaacggcttttactcaagctgctaatggagggaatgtcggttacagaaatctcacagtacagaaatcgcagtgcaaagacaatttcacatcaaaagaagcagctgtatgaaaaactaggcatccagagtgatattaccttctggcgggatatcttttttcaatatcatccgcaagtcatcagtggcacgggaaataaaaataatttttatatccctgataaccgttgtcaccatatcgtcacgcctgaagccatcagtctggcgttggaaaaccacgaattcaaaccgtggatccaaccggttttctgcgcgcagactggggtactgacgggctgtgaggtacttgtccgctgggaacatccacaaacgggaattatcccaccggatcagtttattcctctggcggagtcatccggtcttattgtcataatgacccgccaactgatgaaacagactgcggatattctgatgccggtaaaacatttgctgccggacaatttccatattggcatcaacgtctcggcgggttgttttttggcagcgggatttgaaaaagagtgtctgaacctggttaagaaattaggtaacgataaaatcaagctggttctcgagctaacggaacgtaatcctattccggtaacgccagaagccagagcgatatttgacagccttcatcagcacaacattacctttgcgctggatgactttggtacgggttatgcgacctatcgttacttgcaggcgttcccggtcgattttattaagatcgataagtcatttgtgcaaatggcgagtgtcgacgaaatctccggtcatattgtggacaatattgtcgaactggcgcgtaagcctggtctgagtatcgtggcggaaggggtagaaacccaggagcaggcggatttaatgatcggtaaaggcgttcactttttgcagggctatttgtactctccgccagtaccgggtaataaatttatctctgaatgggtaatgaaagcaggtggttgatgtaaaccgctattcacagcgcatcgggaggttggcagcgattaattctcccgatgcagtaaatcctgatagatccccgttaatatgccatttggcgcaaattgttttttaatccactgcgtcacctgacccgtagcagaatgctgagtcgccagtaacatgcgcgaatcctggcgcggattatggatttgtcgggtaaccagcagggattgcgtcatcgcctcacggaccatgtaatccggcaaaaaaccaattccttcacctaaaatctggcactgacatttggtgttgaaatctggcaccagaattgactcctgcccgtgcagcaaccagcccacttttttattaatcgtatgcgcggtgtcctccaccataatattagggtagagacgcagttggctttcggcgatgggttccggcacaaaggctaacgggtgatccggggcgatagcaaaagcccagcgaatcgcgccaatttcagtgtaatcaattccgccgccgtccagtagtgtatcgggtgcgccgatggcgatattggcctgattattaataatcgcatcccagacgccgttatacacttcggtggtgacggtaatctggcaggtaggaaactgctttttcagcacctgtaacaagcgtgcggtgtgtttgggcgtataaagcagctgattaatacaaatgcgcacacgtgcttctatgccctgcgaaatagtatcgatactgcgtttgatggcgtgaaaatcattcagcaggtcggtagctttgcggaaaaaataacgcccggactccgttaactcaatgctgcgggtactgcgagtgaacagcaccacatccagccccgtctccatacgcttgatggtgtagctaatggcggaagtggttaaacccaactcttctgcggctttactgaagctgccaaaacgcgcagcggtagtaaatgccaacagattctcttcggtaaaaattgagttcattaaaccattctcgccattatctactatgaatttctccagctatgactgtagaggtatcggttaaagatagataatcatttttgaataacttttaatacccgtcgcgtttagtcgtcgcttcgcttaatttttgtccaccatattctgaaattatccccacgcagttacccgccagaaaacccagtaacgtcaccgtccagttcatcccgctggcaaaaaacagcgtcatgccgagaaagccaccgggaataaaggacagtaaccagaaacgcccttgccagaccactaccgccgagaagggtacggtagtaattacgctcgcccagaacgcggacagtccacttacagaggccagccaaccggcagccagcgcggcgaaaaatgcccacaccatcccggaataattaaccgccagacttctgataaaccccgatttaccgccgcctgcggcataaaaactgcaaaaggcgacgaagccaatggttcctaataattcccatccctgagagagcccgacatgtgaagacactaactgccaaagccctgcacaaataccgacggtgacacccgttgccgtgagtccgttcatcttgttcccctctggttagacatggacgaaagctactcttacatgtgcagactatagagaaataaaacctgattgagtgaaagggtatcgggtcaaagaaacaaatattgcactaccgcacactgcgaaaagattgttgaacatcattcaacaaaaaggcgaaatacagcgaattaaatttaagcgggttcttttatcagattatcgttgctattctcaattcatcgaaaacagccacaaaaaccaggggaatgtgaatgagtataaaaaatctacctgccgactatttattggctgcacaacagggtgatatcgataaagtaaaaacctgccttgcgctgggtgtcgatattaatacctgcgatcgtcaggggaaaacggcaattacgctggcaagtttatatcagcaatatgcttgcgttcaggcattaattgatgccggagcggatattaataagcaagatcatacctgtttaaatccttttttaattagctgtctgaacgatgatttaactctactacgaattattttaccggctaaacccgatcttaattgcgtaacccgttttggcggtgtcggcctgacgcctgcctgtgaaaaaggccatttaagtattgtaaaagagcttttggcgcatacggagattaacgttaaccagaccaaccatgtaggctggacgccgctactggaagcgattgtgcttaatgatggtggtattaaacagcaggcgattgtgcagttattgctggaacacggtgccagcccgcatctgaccgataaatatggcaaaacgccactggaactggcgcgggaacggggctttgaagagattgcgcagttactgattgccgcaggtgcataaaccgggaggcttgctatcaacacaccagaaagacggtgtgtgtgggcgctaactgcggatgcggattttctggcgcagcgggggcaaggacaggttgaacaggtctttgccagagcggtaaatatcgcactcccggctcgccagcagttgctgacgctgctttgtgaagagtacgacaatgcgccaaacagttgtcggttggcactcactcactttgatgatctgttccggcatggtgataaggttcagtttgacgatcaaggtattacggttggtcaacatcttcatatagagatgagtcgttgtcggcgttggctgtccccaaccttgcaaatgaccgctgtgaattttcaccttatcgcctggctacagtggcacgacattattcatcagcacctgggggaaaatgaaaccctgtttaattatcgcggcgataatccgttttatcaggcgttaaataaagaactacatattaaacgacgggcagttattcaggcagtaaacgaaaaacaaaatatcgccgcagcggtcgccagtatgattgggttagggattggccttacgccatcagccgacgattatttaacaggtctggcgcttattttatttattcccgggcatccgtcggaaaaatacaaagaggaattttatctcggtatgcagcgcggcagaaataacaccacattattaagtgctataacgctggaagccgcattacaacaacgttgccgggaaaatattcatcgttttattcacaacattatttatgacatccctgggaacgcaactcaggcaatagaaaaaattaaacatattggctccagttccggctgcgacatgctgtatggcatggccgatggttgtgcgctgagccaaacctacggagggaattatgtcagttaaaatagtcattaaaccgaatacctattttgattctgtctcgctgatgtctatctccacgcgtgcaaataaactcgacggcgtcgagcaggcatttgtggcgatggcgaccgaaatgaacaaaggtgtactgaaaaatttaggactgctgacgccggagctggaacaggcgaaaaacggcgacctgatgattgtcatcaacggcaaagcgggcgcggacaacgaacagttgctggtggagattgaagaactgttcaacagcaaagcgcaaagcggctcgcacgaggcgcgttacgccactattgccagcgccaaaaagcatatcccggaaagtaacctggcggtgatttcggttaacggtctgtttgccgctcgcgaagcgcgtcaggcgctgcaaaacgaccttaacgtgatgctgttttccgataacgtctcagttgaagatgaactggcgctcaagcagttggcccacgaaaaagggctgctgatgatggggccggactgcggcacggcgattattaacggcgcggcgctctgttttggtaacgccgtgcgtcgcggcaatatcggtattgttggcgcatccggcaccggcagccaggagctgagcgtccgcattcatgaatttggtggcggtgtttcacaactgattggcaccggcgggcgcgacctgagcgagaaaatcggcggcctgatgatgctcgacgccatcgggatgctggaaaacgatccgcaaactgaaattatcgcactgatttcaaaacctcccgcgcctgcggtggcccgcaaagtgctggaacgcgcacgtgcctgccgcaagccggtggtggtctgcttcctcggtcgcgttgaaacgccggtggatgagcaggggctacagtttgcccgcggcagcaaagaggcggcgctaaaagcggtgatgctctccggcgtgaaacaggaaaatctcgacctgcatacgcttaaccagccgttgattgctgatgtgcgtgcgcgtctgcaaccgcagcagaaatacattcgtggcctgttctgcggcggcacgctgtgcgacgaaaccatgttcgcggtgatggaaaaacatggcgatgtctacagcaacattcagcccgatcctgaattccgcctgcaagatatcaaccgcagcatcaaacacaccttcctcgactttggcgatgacgacttcaccaacggcaagccgcatccaatgattgaccccaccaaccgcatcagtcgcttgatcgaagaagcgcgcgatccagaagtggcggtgatcgtgatggattttgtgctcggatttggatcgcatgaagatccggtcggctccaccatcgaggcgatcaaagaagcgaaagcgatcgccgccgccgaaggacgcgagttgatcattctcgcctatgtgctgggcaccgatctcgatacgccatcattagaacaacaaagccagatgctgcttgatgccggagtgattctggcgagcagcagcaccaataccggattgctggcgcgtgaatttatctgcaaaggggaggaagcctgatgagccagtcactgtttagccaaccgttgaacgttattaacgtcggtatcgccatgtttagcgatgacctgaaaaagcagcatgtagaagtgactcaactcgactggacgccgccggggcagggcaatatgcaggtggtgcaggcgctggataacattgccgattcgccgctggcagacaaaatcgccgccgctaaccagcaggcgctggagcgcattatccagtcgcatccggtgctgattggttttgatcaggcgattaacgtggtgccgggcatgacgccgaaaaccattcttcacgccgggccgccgatcacctgggaaaaaatgtgcggcgcgatgaaaggcgcggtcaccggggcgttggtgttcgaagggctggcgaaagatctcgatgaggcgactgaactggcggcctccggggagatcaccttctcgccgtgccacgaacacgactgcgtgggatcgatggcgggcgttacctcggcctcgatgtttatgcacatcgtgaaaaacaaaacctacggcaacatcgcttataccaatatgagcgagcagatggcgaagattttgcgtatgggtgccaacgatcagagcgtgatcgaccgcctcaactggatgcgcgatgtgcaggggccaatgctgcgcgacgcgatgaaaattatcggtgagatcgatctgcgcttaatgctggcgcaggcgctgcatatgggcgatgagtgccataaccgcaataacgccgggacgacgctgctgattcaggcactgacgccggggatcattcaggcaggctattccgtcgagcaacagcgcgaagtgttcgagtttgtcgccagcagcgactacttctccggcccgacgtggatggcgatgtgtaaagcggcgatggatgcggcgcacggcatcgaatacagcaccgtggtcaccaccatggcgcgtaacggcgtcgagttcggcctgcgggtcagcggcctgccggggcagtggtttaccggcccagcgcagcaggtcatcggcccgatgtttgctggttataagccggaagattcggggctggatatcggcgacagcgccatcacagaaacctacggtattggcgggtttgccatggcgaccgcgcctgcaatcgtcgcactggtgggcggcacggtggaagaggctatcgatttctcccgtcagatgcgcgaaatcacccttggcgaaaaccccaacgtcaccattccgctgctcggttttatgggcgtgccgtcggcaatcgacatcacccgcgtgggtagcagcggcattctgccggtgatcaacaccgccatcgcccataaagatgcgggcgtcggcatgattggcgcgggcattgtgcatccaccattcgcctgcttcgagaaagccattctcggctggtgcgaacgttacggcgtctgacttacatgtttatgccggatgcggtgtgaacgccttatccggcctacggatggcccgagaattgtaggcctgataagcgtagcgcatcaggcagtctggcgttggtcataacctaatcaccctctgtagcggacataacaacatgaaagagcttgtggtcgttgccattggtggcaacagcattatcaaagataacgccagccagtcgattgagcatcaggcggaggcggtgaaagccgtggccgatacggtgctggaaatgctggcttccgattacgacattgtgctgacccacggtaacgggccgcaggtcgggctggatttacgccgtgcggagattgcccacgagcgcgaagggctgcccttaacgccgctggcgaactgtgtggcagatacgcagggcggcatcggctatctgatccaacaggcgctgaataaccggctggcgcgtcacggcgagaaaaaagccgtcaccgtggtaactcaggtggaagtggataaaaacgatccaggttttgcccatcccaccaagcccattggtgcattcttcagtgaaagccagcgtgacaaactacaaaaggcaaaccctgactggtgttttgttgaagatgccggacggggctatcgccgcgtggtcgcctcgccggaaccgaaacgtattgtcgaagcacccgccattaaggcgctgatccaacaaggttttgtcgtaattggcgcgggcggcggtggaattccggtagtgcgtactgaagcgggggattaccaaagcgtggacgcggttattgacaaagatctctctaccgcgctgctggcccgtgaaattcacgccgacattctggtgatcaccaccggcgtcgaaaaagtctgtatccactttggtaaaccgcagcagcaggcgctggatcgggtggatattgccaccatgactcgctatatgcaggaagggcattttccgcccggcagcatgttgccaaaaatcatcgccagcctgacgttcctggagcagggcggcaaagaagtgattatcaccacgccggaatgcctgcctgcggcgctgcgcggtgaaacgggcacccatattattaaaacgtaaggacgtaggatgaaagaaagcaatagccgccgtgaatttctgagccagagcggtaagatggtcaccgccgccgcgctgtttggtacctctgtgccgctcgcccatgcggcggtagctggcaccctaaactgcgaagcgaacaacaccatgaaaatcactgacccgcattactatctcgataacgtgctgctggaaaccggttttgactacgaaaacggtgtggcggtgcagacccgcacggcgcgccagaccgtggagattcaggacggcaaaattgtcgccctgcgcgagaacaagcagcatccggacgccacgctgccgcactatgacgctggcggtaagttgatgctacccaccactcgcgacatgcatattcatctcgacaaaaccttctaaggcgggccgtggcgctcgctcaatcgtccggcaggcaccactatccaggacatgatcaaactcgagcagaaaatgctgccggagttacaaccgtatacgcaggagcgggcggaaaaactgatcgatctattgcagtcgaaaggcaccaccattgcccgcagccactgcaatatcgaaccggtttccggcctaaaaaatctgcaaaatttgcaggcggtgctggcgcggcgtcaggcgggcttcgagtgtgaaatcgtcgccttcccgcagcacggtttgctgctgtcgaaatcggaacccttaatgcgcgaagcgatgcaggcgggtgcgcattacgtcggcgggctggacccgaccagtgtcgatggcgcgatggaaaaatccctcgacaccatgtttcagattgcgctggactacgacaaaggtgtcgatattcacctgcacgaaaccactccgtcgggcgtggcagccatcaattatatggttgaaacggtagagaaaacgccgcaactgaaaggtaagctgaccatcagccacgcctttgcgctggctacgctcaacgaacaacaggtcgatgcgctggcgaatcggatggcggcgcagcaaatttctatcgcctcgacggtgccgattggcacgctgcatatgccgctcaaacagttgcacgacaaaggcgtaaaagtgatgactggcactgacagcgttatcgaccactggtcgccttatggtctgggcgacatgctggaaaaagccaatctctacgcgcagctctatattcgtcctaacgaacagaacctctcctgttcgctgtttctagccactggcgatgtattgccgctgaatgaaaaaggcgagcgtgtatggccaaaagcgcaggatgatgccagctttgtgctggtggacgcctcctgttccgccgaggcggtggcgcgtatctcgccgagaaccgcaacgttccataaagggcaactggtgtgggggagtgtggcaggttgatgcgcatttgaaacgcctgcaacggtgaattgtaagagatttaagccccagggagtggggcgggaatggtttgctaatgaatgatcctgaactttataatctcgcggcataatttccaggggattatttgagagaaatacacaaaagtgagttttaacaaaggtatttatcaggccataaatgtgacctgcttcggataaaaaagattcagtatcgaaaaaccaatgatactcttgctgatggttaccaacagtaattaagatgtgatttgtttttccgtaatcgcaaaaatattgccatgaccataaaagaaaaattctcacaaaaatatccccatgcttccttttgtacttttggcgattcagcagcgttggccgatcacctcgcaacgttgattgcgactggtgttaaaacagcttcctgtggttcgctggcgggatgtattgaagacaacgcatttccgatgattggtgagtataagattgtagaaaatagccgtggtgagcctgtatgtgttatcagagtgattggcctgcatttactgcgcttttctgatgtcaccgtggagcttgcccgtaaggaaggtgaaggtgacctcagtcttgaatattggcgtaatgaacaccgtcgttttttccaggcagaaggaagctattcaccagaaatggacgttatatttgaagaatatgcccttattgacgttgtgtagataactatttatctacgcgaaataaactcacacacataaaatatcgctaattttgtttattttgctattttttacgtaatgaatgtcacacttattgttgctgcccgttttgtccatatttataaccatatttttaatagctgcctgaaatagggctgtttattctgcataaaaatattcgaaaattcttattctctccagcgcgctaatttgggcgaacacttcctgactaccctgcaatgaggctgaaatgatgaataaacgttttgttatcaatatggtgtcttcgctgttattaggcgctgcgctaatttctgcgccgctccaggcagcggaaaaagtcgtggtgaatatttctaaagtcgatggtatgccgtggtttaatcgcatgggcgaaggtgtggttgaggcgggtaaagcctttggtgttaatgcctcacaggtggggccttcaagtactgatgctccgcaacaagttaaaattattgaggatttaatcgcccgtaaggttaatgcaattactatcgtgccaaacgatgccaacgtgctggaaccggtattcaaaaaagcgcgagatgccggaattgtggttctgaccaacgaatcccccggtcagccaagtgctaactgggatattgaaatcattgataacgaaaaatttgccgctgaatatgttgagcatatggcgaaacgcatggggggcaagggcggctatgtgatttacgtgggtagtttgaccgtgccgcagcataacttatgggctgacttgctggtgaaataccagaaagagcattacccggatatgcatgaagttacccgccgcatgccggttgccgagagtgtggatgactcacgtcgtaccacactggacctgatgaaaacctatcctgacttgaaagcggttgtctcctttggttcaaacggtccgattggcgcgggacgtgcggtgaaagagaaacgggcgaaaaataaagtcgcagtctatggcatgatgatcccttcacaggcggcatcactgattaaaagtggtgatatcaccgaagggattacttacgatccggcctctgcaggttacgcactcgcagccgtcgccagcacgttgctgaagggtgaagagatcaaacctggattagaaatgcagaatctgggtaaggccgacgtagatatggataagcgaattatccgtttccataaggtattactggtcaacaaagacaatatcgactcactttattaatccatttcttcggggcgaaagccccgattcttattgccaggggatgttatggaaactttcctttcccttcgtcatatcaacaaaacgtttcatgccacgcgagcgctgcgcgatgtttctctcgactttatgtcgggtgaagtgcactgccttgccgggcaaaacggctgtggtaaatcgacgttgattaaaattatgtccggtgtttatcgcccggatgagggagcggaaattacgcttggtgggaaaaactggtcaaagctgacacccgccgcttcggtggcgcaggggattcaggtgatttatcaggacctctctttatttcctaacctgagtgtctgggagaatatcgccgtgaatcactatcaccacggtctgtttgttaaccgccgtcgtctgcgtgaggtggcgcaggcggcaatgaccagtattaacgtcacattgccactggatacactcgtttctgagctttcaattgcccgctgtcagctggtggctatttgccgtgcactggcgcaggacgcacggttgatcgtgatggatgaaccaaccgcttcgctgacccatcaggaagtgcaagggttattacaggtggtgcatcaattgcgtgaacgcgggatctgcgtggtcttcgtcagtcatcgtctggaagaagtgatggaagtttccgaccgtatttcagtgctgaaagatggtgagctggtcgggacttttccggctgcagagatgaccacaaaacaactcggtttcctgatgaccggccaggagtttgaatatcaggtgcgagagttgtggcagggaaaatccagcaccccggtgctggaggtgcgtaatttaagtcgtcatggggaatatctaaatattaacttgcgggtggaagcgggcgaagtggtatcgattgttggcctgcttggtgcggggcgcacggaattatgtctgagtctgtttggtatgacccgaccggatgctggcgagatcctcatcaacggccagccggttacactgcatagtaaccaggacgctatccgccacggtattggttatgtttcggaagatcgcatgtcgcgcggtttggtgatggcgcaatctattgaagacaacatcattagcactgtttttcacaaggtaaaagatcgcttcggctttctgagtgaaactaaagttcgtgacctggtggacaggctaatcaaggcattgaccatcaaagtctctgatcctcatcttccggtgaatacgctttctggtggtaacgcgcagcgagtatcgatcgccaaatggctggcgattgggccacgactgttgattctcgatagcccgacagtcggtgttgatatcgccaacaaagcaggaatatacggcattatcagcgatctggcggctcatggcattgcggtattgatgatctgcgatgaaattgaagaagcgtggtatcaaagccaccggattttggtaatgcaaaaaggtcagatcacccatagcttcctgcctgacagcagttctcaggccaggattgcggaggtggtaaatggctgaactgaaaaaacgccatgaattctggctggcattactgattgtggtgctgtttgttggccttgcctggcgcagcgacgagtttctgacattcggtaatttgtacgatctcgccaataactatgccatgttgactattctcgcctgtggtttgtttgtggtgttgatttccggtggaattgatatttcgtttccagcaatgaccatcattgcgcaatacggcatggtgctgttgctgcaaaaaattggtggcaacttcgctgtcgcgtttgcactggcgggctgcatcggcattttacttggcttaattaacgccttactggttaatcgcctacgggtgccttctatcatcatcactatctcgacgctgaatattttctatggcctgctgttatggttgagtaaaggtgtgtggctgtacgactttccgccgtggtttgagcagggggttatgttgttcaagtacaccgatgctgatggctatgactatggccttggtctgccgctgatcgccatgattacggtggtgctgctaacagcgtttatcatgaatttcaccagtgtagggcgcaaaatttatgcccttggcgggaaccgcgaatcagccagtcgcatcggctttagcgtgctgaaactgcaacttttcgtctatggctatatgggattgatgtctggcgctgcgggtgtagtgcagtcgtggacggtgatgactgtcgcccccgattctcttctgggttatgagctgacagtactggctgcggtggtgcttggcggcactagtttgctcggcgggcgcggcacgttaaccggtactttgctcggcgtggtgttgttggcagtgatgcaaaacgggctaaatttattgggagtctcgtcttactggcaaacattgatcaccggcatcatcatcgttgccagcattagtgccacggcgtggagtcagcatcagaaccggagtctgctatgaaaaaatcgtggcgtaataacgttgagttttacttgatcggcctgctggtgctaactgttgccgcgttcagcattactatgccggagattttctggtcgataagtaatttccagtccgtcgcttcgcaaatgcccgtgctgggcattctggcgttggctatggcggtgaccatgctttgcggtggcattaacttgtcaattatagccactgctaacgcctgttcactggtgatggcgtgggtggcgactcagtatccaccgggtattgctacggttgtcgctacgttactggcgggcgctggcgcggcggtgataatcggtttatgtaacggcgtattgattgctggtattcgagtgtcgccaattcttgcaacgcttgggatgatgacgttgctcaaagggataaatattctggtgacaggtggtagcgccattgccaattatccctcatgggtgctgtggttgaatcatgcgcaatggttcggtattccgctaccgatgtggttgtttgccgcagtggcactggggctgtggatattgctggagaaaacgccgctcggtaaagccatttacctgattgggtctaacgaacgagcaacactttactccggcattaacactcgtcgggtgctgatttgggtttatgtcatttccgccttgctttgtgcggtagcggcattttgatgatgtcgaaactcaactcggctaaggcctcttatggcgaatcgtacttgctggtgtcaatcctcgcggcagtactcggcggggttaatccggacggcggcagcgggcggataattggtatggtgctggcgctgtttcttctgcaaattattgaaagcggcttcaatattctcggtataagcccctacctgacgatggccttatggggaacgttgctgctctgtttcattcaggttcgcggcatgttggggctggatcgggtggtttaaatattggctatattcaatggacgcgttttgccgcgatgacatatcaggcatcgccaaatacacatagctaatcaggagtaaacacaatgaagatcaaagctattggtgcatattccgctaaacaaccacttgaaccgatggatatcacacggcgtgaaccgggaccgaatgatgtcaaaatcgaaatcgcttactgtggcgtctgccattccgatctccaccaggtccgttccgagtgggcggggacggtttacccctgcgtaccgggtcatgaaattgtggggcgtgtggtagccgttggtgatcaggtagaaaaacatgcgccgggcgatctggtcggtgtcggctgcattgtcgacagttgtaaacattgcgaagagtgtgaagacgggctggaaaactactgtgatcacatgaccggcacctataactcgccgacgccggacgaaccgggccatactctgggcggctactcacaacagatcgtcgttcatgagcgatatgttctgcgtattcgtcacccgcaagagcagctggcggcggtggctcctttgttgtgtgcagggatcaccacgtattcgccgctacgtcactggcaggccgggccgggtaaaaaagtgggcgtggtcggcatcggcggtctgggacatatggggatcaagctggcccacgcgatgggggcgcatgtggtggcatttaccacttctgaggcaaaacgcgaagcggcaaaagccctgggggccgatgaagttgttaactcacgcaatgccgatgagatggcggctcatctgaagagtttcgatttcattttgaatacagtagctgcgccacataatctcgacgattttaccaccttgctgaagcgtgatggcaccatgacgctggttggtgcgcctgcgacaccgcataaatcgccggaagttttcaacctgatcatgaaacgccgtgcgatagccggttctatgattggcggcattccagaaactcaggagatgctcgatttttgcgccgaacatggcatcgtggctgatatagagatgattcgggccgatcaaattaatgaagcctatgagcgaatgctgcgtggtgatgtgaaatatcgttttgttatcgataatcgcacactaacagactgaaaaaattaataaatacgctgtggtttaacatattaacttcgctctccacttaactttttagttaaggagagcgaaataatatcaaagtagcagtaaaacctataacgtaaattcaaattgttaaattaactccctccagtacacaatacttcacacgttagttatgagcgatttctgatagtgcctggtttaatcagagctttattatctgcgacgtttattttatttaagagagatcgcgatgatatcattaaaagctccgcacaataatttgatgccatatacgcaacaaagcatacttaatacggttaaaaacaatcagttaccagaggatatcaaaagctccctggtttcctgtgtcgatatattcaaggttttgattaaacaatattatgattatccttatgattgtcgtgatgatttagtcgatgacgacaaactcattcatctcatggctgccgtacgagactgtgagtggtcagacgataacgcactcaccataaatgtgcagtttaatgatttccctggattttatgactggatggattaccctgatcacccggttaagtttgtttttcgcatacttgaaaatcaaaaagggacagtttgggtatatgaccaggatgatgcgtttcttgatattaaagcaaatgtgcaggctggacgctttaccgggcttaagaaattagttcagtttatcgattcagtgcgaacagattgcaaatgtattcttcttgaacaccatatgcctttgctgagacttttccctaaagggaaagagtgtatgcatgtggaaaaatggcttcgcgaaatgtcgtctattccggagacagacgcgcccattaagcaggcgcttgcgcatggattattattacacttaaaaaatatctaccctgtttttcctgaatcactggtgatgttattgctctctgttctggacgtaaaacatacagagatgacgcacgattaaatgaatggatatcgaatagagtgcaggaattaggtgacagatattatcctgtaaataagcacgttaaaatccgctacactctttagttcagaaagggttccacctgcaagttgttattccaccagagagtgaatcgcaaagcaggtaatcatttcatctgtatatccgtatgctaaatggcattccaccgccttttcgccgatattttgttgtgatcagcgacgcttcgcttaaaaaagcaccagcagtggtttcgcagctatgtggtgtataaaaaatgatctcatgcagatgttttgtgaatgtgtgggttgacattcatatgaaaaaaatcataattccatcatgtttgtatggggtcttttctgtaccttacgcatcgcactcaagcctgacagaaaatatgctgtaaggctcatatcaaaaaccgccattagctcatcaggaagagcagacgacaaccaggattgttgtatggtacggggttcgaggcctcgatggcggtccaacttttcaaaactcttctgaatcagatccccttattatcatcctgcaaagtggaacattgccattgtttggctattcaggacggggcagaccaatgaaaaaagcccacacaggggagagtgggctgaaatgggaagctaaagactcaagtaaacttatcggaaataaggaccacgcattacgggggctatcatcgccgatggccgggattcggcaaatcaggttgattacgtagagagtaaattatctgctcaccgctgcgtcaccccttcgtaaatcaggcgtagcgcgaatacaccaataattgcaccaataacccgactggcaacgcgttgcatacgcccataagcacgacgcacagcgggcaaagaaaacgcctgactaagaaaaactcgccagataattgatgcgagcacaatccccgcccaggccattaaacgtgcccatgttggtgtttcggcatttaatgttactgagaaaatactaataaaaaataaaacggtttgcgggttagagagatcggtaattaatccgcggcgaaaaaagacataccagggggcgctaatcggttgttgtagtgtgctcatttgcggtgttgactggcggcgcatgctgcaccacgcaaaccataagagataagcgccgccgacgattctgataagcgaaaaaatctcctcacactgcgtaattagtgttgcaagaccaaacaaacccaacccggaataaaatgcatcgcccagcgccacccccagcccggtcagcacacctgcgcgtcgaccggaagccaggctggtttgtactaccacaaagagattggctcccggattaaaaaaagtaatcacgaacagtcctacggtcaggtaaacggcgtgcaaaggatccatagtgatttcatccataaataagtgaagtaacttcatcatatttctaccaaaaataatcgggtgcgaaagagatcacaaagtgtcttatttccggttactggcgtttatgccctgactgaactaattattaatcaacccaataatgtgggtgggtgatagtgtgataacaactctggagccgtaatatgaaaataatctctaaaatgttagtcggtgcgttagcgtttgccgttaccaatgtctatgccgctgaattgatgaccaaagcggaatttgaaaaagttgaatcgcagtatgaaaaaataggtgatatttcaaccagtaatgaaatgtcgaccgcagatgcgaaagaggatttgatcaaaaaagcggatgaaaaaggggctgatgtgttggtactgacctctggtcaaactgacaataagatccacggcacggcaaatatttataagaagaagtaattctgaaacctatgtaaacatccccgatgcgtaaatttatcggtgatcatcatctattgaaatttatgccggataaagcgttcgcgctgcattcggcagttcagtttttcagccgccgccagaacgtcgtccggcttatgcctaaataattcgccgctgctgttttatcgcctttaaatttctccagtgcctgttgtggtgtcagtaagcgtggagcgggaattttcgccgactcgcgcgccagctccggcagtagcagttgcataaactgcggcgttaaatccggcgtcggttccacacttaaaaacagcgccagtcgttccatcatattgcgcagttcacgaatattgcctggccagtcgtagtgcaccagcacggtttcgcttgcctgtaatccctggcgtaatgcggcagaaaacggggcggagagcgccgccagagacactttcaaaaagctttccgccagcggaagaatatccgccacccgctcgcgcagtggtggcaattgcagacgcaaaatactcagccgataaaacagatcacggcgaaactgcccttgccgcatatcttcttccagattgcagtgagtggcgctaatgacccgcacatccaccggaacaggctgatgcccgccgacgcgagtaacctctttttcttccagcacccgtaacaggcgagtctgcaaaggtagcggcatttcgccaatctcatccagaaacagcgtaccgccgtgggcaatttcgaacagcccggcgcgacctccgcgtcgcgagccggtaaacgccccttcctcatagccaaacagctccgcttccagcagcgattcggctatcgccccgcagttgacggcaacaaacggatgcgactttttgccctgtcgcgcatcgtggcgggcaaaatattcccgatgaatcgcctgggccgccagctctttgcccgtccccgtttccccttcaatcaacaccgccgcactggagcgggcatacagcaaaatagtctgccgtacttgttccatctgtggtgattgaccgagcatatcgcccagcacgtaacgagttctcagggcgttgcgggtggcatcgtgagtgttatggcgtaacgacatgcgcgtcatatccagcgcatcgctgaacgcctggcgcacggtgacggcggaatagataaaaattccggtcattccggcttcttctgccagatcggtaatcagccccgcaccgaccaccgcttcggtgccgttagctttgagctcgttaatctgcccgcgggcgtcttcttcggtaatgtagctacgttgatcgaggcgcaaattaaaggttttttgaaacgccaccagtgccggaatagtttcctgataagtgacaacgccgatagaagaggtgagctttccggcttttgccagtgcctgtaacacatcgtagccgctcggtttaatcaaaataactggcactgacaggcggcttttcaggtacgcgccgttagagccagcggcgatgacggcgtcgcagcgttcgtttgccagtttcttgcggatataggtcactgctttttcaaagccaagctggataggggtaatgttcgccaggtgatcaaactcgaggctgatatcgcgaaacagctcgaacaggcgcgttacagataccgtccagataaccggtttgtcgtcattaagccgtggtggatgtgccatagcgcaccgcaaagttaagaaaccgaatattgggtttagtcttgtttcataattgttgcaatgaaacgcggtgaaacattgcctgaaacgttaactgaaacgcatatttgcggattagttcatgacgttatctctaacaaattgaaattaagcatttaattttattaaggcaattgtggcacaccccttgctttgttttattaacgaaaataacaagttgataacaaaggatgggctatgtctctacactctccaggtaaagcgtttcgcgctgcactgactaaagaaaatccattgcagattgttggcaccatcaacgctaatcatgcgctgttggcgcagcgtgccggatatcaggcaatttatctctccggcggtggcgtggcggcagggtcgctggggctgcccgatctcggtatttctacccttgatgatgtgctgacagatattcgccgtatcaccgacgtttgttcgctgccactgctggtggatgcggatatcggttttggttcttcggcctttaacgtggcgcgtacggtgaaatcgatgattaaagccggtgcggcaggattgcatattgaagatcaggttggtgcgaaacgctgcggtcatcgcccgaacaaagcgatcgtctcgaaagaggagatggtggatcggatccgcgcggcggtggatgcgaaaaccgatcctgattttgtgatcatggcgcgcaccgatgcgctggcggtagaggggctggatgcggcgatcgagcgtgcacaggcctatgttgaagcgggtgccgagatgttgttcccggaggcgattaccgaactcgccatgtaccgccagtttgccgatgcggtgcaggtgccgatcctcgccaacattaccgaatttggcgcaacaccgctgtttaccaccgacgaattacgcagcgcccatgtcgcaatggcgctgtacccactttcagcgttccgcgccatgaaccgcgccgctgagcatgtctacaacgtcctgcgccaggaaggcacgcagaaaagcgtcatcgataccatgcaaacccgcaacgagctgtacgaaagcatcaactactaccagtacgaagcgaagctcgacgacctgtttgcccgtagccaggtgaaataaaacacaacgaaaaatatctcgaccctacaaatgacgaggacaatatgagcgacacaacgatcctgcaaaacagtacccatgtcattaaaccgaaaaaatcggtagcactttctggcgttccggcgggcaatacggcgctctgcaccgtgggtaaaagtggcaatgacctgcattaccgtggctacgatattcttgatctggcggaacattgcgaatttgaagaagtggcgcacctgctgatccacggcaaactgccgacccgtgacgaactcgccgcttacaaaacgaaactgaaagccctgcgtggtttaccagctaatgtgcgtaccgtgctggaagccttaccggcggcgtcgcacccgatggatgtcatgcgcaccggcgtttccgcgctcggctgcacactgccagaaaaagaggggcacactgtctctggcgcgcgggatattgccgacaaactgctggcatcacttagctcgattctcctttattggtatcactacagtcacaacggcgaacgcatccagccggaaaccgatgacgactccatcggcggtcacttcctgcatctgctgcacggcgaaaagccatcgcaaagctgggaaaaggcgatgcatatctcgctggtgctgtacgccgaacacgagtttaacgcctccacctttaccagtcgggtgattgcgggcaccggctctgatatgtattccgcgattattggcgcgattggcgcactgcgcgggccaaaacacggcggggcgaatgaagtgtcgctggagatccagcaacgctacgaaacgccggacgaagccgaagcagatatccgcaagcgcgtggaaaacaaagaagtggtcattggttttggtcatccggtttacaccatcgctgacccgcgccaccaggtgattaaacgtgtggcgaagcagctctcgcaggaaggcggctcgctgaagatgtacaacatcgccgatcgcctggaaacggtgatgtgggagagcaaaaagatgttccccaatctcgactggttctctgctgtttcctacaacatgatgggcgttcccaccgagatgttcacaccactgtttgttatcgcccgcgtcaccggctgggcggcgcacattatcgaacaacgtcaggacaacaaaattatccgtccttccgccaattatgttggaccggaagaccgcccgtttgtcgcgctggataagcgccagtaaacctctacgaataacaataaggaaacgtacccaatgtcagctcaaatcaacaacatccgcccggaatttgatcgtgaaatcgttgatatcgtcgattacgtcatgaactacgaaatcagctctaaagtggcctacgacaccgcacattactgcctgctcgacacgctcggctgcggtctggaagctctcgaatacccggcctgtaaaaaactgctggggccaattgttcccggcaccgtcgtacccaacggcgtgcgcgtccccggaactcagttccagctcgaccccgtccaggcggcatttaacatcggcgcgatgatccgctggctcgatttcaacgatacctggctggcggcggagtggggccatccttccgacaacctcggcggcattctggcaacggcggactggctttcgcgcaacgcggtcgccagcggcaaagcgccgttgaccatgaaacaggtgctgaccgcaatgatcaaagcccatgaaattcagggctgcatcgcgctggaaaactcctttaaccgcgtcggcctcgaccacgttctgttagtgaaagtggcttccaccgccgtggtcgccgaaatgctcggcctgacccgcgaggaaattctcaacgccgtttcgctggcgtgggtggacggtcagtcgctgcgcacctatcgccatgcgccgaacaccggcacgcgtaaatcctgggcggcgggcgatgccacttcccgcgcggtacgtctggcactgatggcgaaaacgggcgaaatgggttacccgtcagccctgaccgcgccggtatggggcttctacgacgtctcctttaaaggtgaatcgttccgcttccagcgtccgtacggttcttacgtcatggagaatgtgctgttcaaaatctccttcccggcggagttccactcccagacggcagttgaagcggcgatgacgctctatgaacagatgcaggcagcaggcaagacggcggcggatatcgaaaaagtgaccattcgcacccacgaagcctgtattcgcatcatcgacaaaaaggggccgctcaataacccggctgaccgcgaccactgcattcagtacatggtggcgatcccgctgttattcgggcgcttaacggcggcagattacgaggacaacgttgcgcaagataaacgcatcgacgccctgcgcgagaagatcaattgctttgaagatccggcatttaccgctgactaccacgacccggaaaaacgcgccatcgccaatgccattacccttgagttcaccgacggcacacgatttgaagaagtggtggtggagtaccccattggtcatgctcgccgccgtcaggatggtattccgaaactggtcgataaattcaaaatcaatctcgcgcgccagttcccgactcgccaacagcagcgcattctggaggtttctctcgacagaactcgcctggaacagatgccggtcaatgagtatctcgacctgtacgtcatttaagtaaacggcggtaaggcgtaagttcaacaggagagcattatgtcttttagcgaattttatcagcgttcgattaacgaaccggagcagttctgggccgagcaggcccggcgtattgactggcagacgccctttacgcaaacgctcgaccacagcaatccgccgtttgcccgttggttttgtgaaggccgaaccaatttgtgccacaacgctatcgaccgctggctggagaaacagccagaggcactggcattgattgccgtctcttcggaaacagaagaagagcgcacctttacctttcgccagctgcatgacgaagtgaacgcggtggcctcaatgttgcgctcactgggcgtgcagcgcggcgatcgggtgctggtgtatatgccgatgattgccgaagcgcatattactctgctggcctgcgcgcgcattggtgctattcactcggtggtgtttggtggatttgcctcgcacagcgtggcggcgcgaattgatgacgctaaaccggtgctgattgtctcggctgatgccggagcgcgcggtggcaaaatcattccctataaaaattgctcgacgatgcgataagtcaggcgcagcaccagccacgccatgttttgctggtggatcgcgggctggcgaaaatggcgcgcgtcagcgggcgggatgtcgatttcgcgtcgttgcgccatcaacacatcggcgcgcgggtaccggtggcgtggctggaatccaacgaaacctcctgcattctctacacttccggcacgaccggcaaacctaaaggcgtgcagcgtgacgtcggcggatatgcggtggcgctggcgacctcgatggacaccatttttggcggcaaagcgggcagcgtgttcttttgcgcatcggatatcggctgggtggtggggcattcgtatatcgtttacgcgccgctgctggcggggatggcgactatcgtttacgaaggattgccgacctggccggactgcggcgtgtggtggaaaatcgtcgagaaatatcaggttagccggatgttctcagcgccgaccgccattcgcgtgctgaaaaaattccctaccgctgaaattcgcaaacacgatctctcgtcgctggaagtgctctatctggctggagaaccgctggacgagccgaccgccagttgggtgagcaatacgctggatgtgccggtcatcgacaactactggcagaccgaatccggctggccgattatggcgattgctcgcggtctggacgacaggccgacgcgtctgggaagccccggcgtgccgatgtatggctataacgtgcagttgcttaatgaagtcaccggcgaaccgtgtggcgtcaacgagaaagggatgctggtggtggaagggccgctgccgccgggctgtattcagaccatctggggcgacgacgaccgctttgtgaagacttactggtcgctgttttcccgcccggtgtacgccacctttgactggggcatccgtgacgctgacggttatcactttattctcgggcgcactgacgatgtaattaacgttgccgggcatcgtctgggcacgcgcgagattgaagagagtatctccagccatccgggcgttgccgaagtggcggtggttggggtgaaagatgcgctgaaagggcaggtggcggtggcgtttgtcattccgaaagagagcgatagtctggaagatcgtgatgtggcgcattcgcaagagaaggcgattatggcgctggtggacagccagattggcaactttggtcgcccggcgcacgtctggtttgtctcgcaattgccgaaaacgcgatccggaaaaatgctgcgccgcacgatccaggcaatttgcgaaggacgcgatcctggggatctgacgaccattgatgatcctgcgtcattggatcagatccgccaggcgatggaagagtaaggtattgtcggatgcgtcgcgtgccgcatccgacatcatgcgccgatgcctgatgcgacgcttaccgcgtcttattatgcctacaggcctgaaccgtaggtcggataaggcgctcgcgtcgcatccgacaccccgcgccgatgcctgatgcgacgcttaccgcgtcttatcatgcctacaggtctgaaccgtaggtcggataaggcgctcgcgccgcatccgacaccatgctcagatgcctgatgcgacgctgacgcgtcttatcaggcctacctattatccctccagtgcagagaaaatcggccagttttctctgcctgcagtccgcatgccgtatcgggccttgggttctaacctgttgcgtagatttatgcagcggactgcctttctcccaaagtgataaaccggacagtatcatggaccggttttcccggtaatccgtatttgcaaggttggtttcactatggaacatgaacttcattatatcggtatcgacaccgctaaagagaaactggatgtcgatgtgttgcgtcctgatggtcgtcatcgcaccaaaaaattcgctaacaccactaaagggcacgatgagctggtgagctggctgaaaggtcacaagattgaccatgcgcatatctgcatcgaagcgaccggcacctatatggaacctgtcgctgagtgcctttacgatgctggctacatagtgtcagtcattaatcctgcgctgggtaaagctttcgctcagagtgaaggactgcgtaacaagactgataccgtggatgcgcgcatgctggcagagttctgtcgtcagaagcgccctgcagcctgggaagcgcctcacccgcttgaacgcgcgttgcgtgccctggtagtccgccaccaggcgctgacagatatgcacacgcaggaactgaatcgcactgaaacggcgcgggaagtccagagaccgagcattgatgctcaccttctgtggcttgaagcagagctgaagcgtcttgagaagcagataaaagacctgacagacgatgatccggatatgaaacaccgcaggaaactgctggaaagcatcccgggtatcggagagaaaacatctgcggtattgctggcttatatcggtctgaaggaccgcttcgcccatgccagacagttcgccgcttttgcgggtctgacaccacggcgttatgaatcaggtagcagtgtgagaggggcgagccggatgagtaaggccggacatgtgtcgcttcgcagggcgttgtatatgcccgcaatggtagccaccagtaagactgagtggggacgggcgttccgcgaccgtctggcggctaatggc

SEQ ID NO: 112 - DNA, 231 bp, Escherichia coli
accgtctggcggctaatggcaagaaaggaaaggtgattctcggcgcgatgatgcgcaagctggcacaggtggcgtatggagtgctgaagtcaggcgtgccgttcgatgcgtcacggcataatccggtagcggcgtaaaaatcgcggaagggatgaaaaaaacagcgcctgacggcgctgtgtctggcatgcctgcaatccgggaaaccggaccaggaaaaacttgcaggcc

SEQ ID NO: 113 - DNA, 45308 bp, Escherichia coli
  modified_base (25814)..(25814): a, c, t, g, unknown or other
caccatgctcagatgcctgatgcgacgctgacgcgtcttatcaggcctacccactgtttttacaccgataatttttcccccacctttttgcactcattcatataaaaaatatatttccccacgaaaacgattgctttttatcttcagatgaatagaatgcggcggattttttgggtttcaaacagcaaaaagggggaatttcgtgtcgcaagataacaactttagccaggggccagtcccgcagtcggcgcggaaaggggtattggcattgacgttcgtcatgctgggattaaccttcttttccgccagtatgtggaccggcggcactctcggaaccggtcttagctatcatgatttcttcctcgcagttctcatcggcaatcttctcctcggtatttacacttcatttcttggttacattggcgcaaaaaccggcctgaccactcatcttcttgctcgcttctcgtttggtgttaaaggctcatggctgccttcactgctgctgggcggcacccaggttggctggtttggcgttggcgtggcgatgtttgctattccggtgggcaaggcaaccgggctggatattaatttgctgattgccgtttccggtttactgatgaccgtcaccgtcttctttggcatttcggcgctgacggttctttcggtgattgcggttccggctatcgcctgccttggcggctattccgtgtggctggctgttaacggcatgggcggcctggacgccttaaaagcggtcgttcccgcacaaccgttagatttcaatgtcgcgctggcgctggttgtggggtcatttatcagtgcgggtacgctcaccgctgactttgtccgctttggtcgcaatgccaaactggcggtgctggtggcgatggtggcctttttcctcggcaactcgttgatgtttattttcggtgcagcgggcgctgcggcactggggatggcggatatctctgatgtgatgattgctcagggcctgctgttgcctgcgattgtggtgctggggctaaatatctggaccaccaacgataacgcgctctatgcgtcgggtttaggtttcgccaacattaccgggatgtcgagcaaaaccctttcggtaatcaacggtattatcggtacggtctgcgcattatggctgtataacaattttgtcggctggttgaccttcctttcggcagctattcctccagtgggtggcgtgatcatcgccgactatctgatgaaccgtcgccgctatgagcactttgcgaccacgcgtatgatgagtgtcaattgggtggcgattctggcggtcgccttggggattgctgcaggccactggttaccgggaattgttccggtcaacgcggtattaggtggcgcgctgagctatctgatccttaacccgattttgaatcgtaaaacgacagcagcaatgacgcatgtggaggctaacagtgtcgaataacgctttacaaacaattattaacgcccggttaccaggcgaagaggggctgtggcagattcatctgcaggacggaaaaatcagcgccattgatgcgcaatccggcgtgatgcccataactgaaaacagcctggatgccgaacaaggtttagttataccgccgtttgtggagccgcatattcacctggacaccacgcaaaccgccggacaaccgaactggaatcagtccggcacgctgtttgaaggcattgaacgctgggccgaacgcaaagcgttattaacccatgacgatgtgaaacaacgcgcctggcaaacgctgaaatggcagattgccaacggcattcagcatgtgcgtacccatgtcgatgtttcggatgcaacgctgactgcgctgaaagcaatgctggaagtgaagcaggaagtcgcgccgtggattgatctgcaaatcgtcgccttcccgcaggaagggattttgtcgtatcccaacggtgaagcgttgctggaagaggcgttacgcttaggggcagatgtagtgggggcgattccgcattttgaatttacccgtgaatacggcgtggagtcgctgcataaaaccttcgccctggcgcaaaaatacgaccgtctcatcgacgttcactgtgatgagatcgatgacgagcagtcgcgctttgtcgaaaccgttgctgccctggcgcaccgtgaaggcatgggcgcgcgagtcaccgccagccacaccacggcaatgcactcctataacggggcgtatacctcacgcctgttccgcttgctgaaaatgtccggtattaactttgtcgccaacccgctggtcaatattcatctgcaaggacgtttcgatacgtatccaaaacgtcgcggcatcacgcgcgttaaagagatgctggagtccggcattaacgtctgctttggtcacgatgatgtcttcgatccgtggtatccgctgggaacggcgaatatgctgcaagtgctgcatatggggctgcatgtttgccagttgatgggctacgggcagattaacgatggcctgaatttaatcacccaccacagtgccagaacgttgaatttgcaggattacggcattgccgccggaaacagcgccaacctgattatcctgccggctgaaaatgggtttgatgcgctgcgccgtcaggttccggtacgttattcggtacgtggcggcaaggtgattgccagcacacaaccggcacaaaccaccgtatatctggagcagccagaagccatcgattacaaacggtaatttcctctgtgttgaagagccactgacctgtgtcagtggctaccgtgattcattctcgccaacatccgcacattcctccaacgccatgtgcaaaaatgccttcgcggcggctgtctgccagctatttttccgccgcaacaaaaccgccgttctctccagtagtggcggggcaagagaaatcgctttaagcccgtcatgttgtgtggcaatcgctgctggtaacaatgtggaaagggaagtgcggcgaatcagctccagaaccgcgctaattgagttcgcctcaatgaccacctgtggatgtagccccgctttctcgcagtagtggtcaatttgctctctggtggcaaattccgcgctgagcaggaccagtttttcatcatgcaagcgactcaacgccacctgttcacaggcagccagcggatgatgtttcgccaccaccaacgctaaactttctgtcagtaaaggaattgcctccagctccggcgaatgcacaggcgcgaaggcaatcccaacgtccagctcgtcgcgacaaagcagatcttcgattttctcctgcgacatttcctgtagctggagcgtgatgccggggtagcgcgcatagaaatccgccattaaggggccgataaagtagctcgtaaaggtgggggtgacggcgatacgcagcgatcctcgcgtcagagcggcaacatcatgaatcgcccgtttacccgctcccagttcatgtaacgcccggctggcgtactgtcgccagacttctcctgcatcggtgagacgaatcgttcgcccgctacggtcaaacagcggcacgcccaaactctcctctaactggcgaatctgctgggaaagcgcaggctgggagacgtgcaacgcactggcggcacgggtgaagctgccatgttcagccacggcaagaaagtaattgatatgtcgagagagcattcgccaacctataagtaaatccaatagaactcatcataaatgagacttttaccttatgacaatcggcgagtagtctgcctctcattccagagacagacagaggttaacggtgaaagagattattgatggattccttaaattccagcgcgaggcatttccgaagcgggaagccttgtttaaacagctggcgacacagcaaagcccgcgcacactttttatctcctgctccgacagccgtctggtccctgagctggtgacgcaacgtgagcctggcgatctgttcgttattcgcaacgcgggcaatatcgtcccttcctacgggccggaacccggtggcgtttctgcttcggtggagtatgccgtcgctgcgcttcgggtatctgacattgtgatttgtggtcattccaactgtggcgcgatgaccgccattgccagctgtcagtgcatggaccatatgcctgccgtctcccactggctgcgttatgccgattcagcccgcgtcgttaatgaggcgcgcccgcattccgatttaccgtcaaaagctgcggcgatggtacgtgaaaacgtcattgctcagttggctaatttgcaaactcatccatcggtgcgcctggcgctcgaagaggggcggatcgccctgcacggctgggtctacgacattgaaagcggcagcatcgcagcttttgacggcgcaacccgccagtttgtgccactggccgctaatcctcgcgtttgtgccataccgctacgccaaccgaccgcagcgtaaccttatttttaaaccatcaggagatccaccatgattcagtcacaaattaaccgcaatattcgtcttgatcttgccgatgccattttgctcagcaaagctaaaaaagatctctcatttgccgagattgccgacggtaccggtctggcagaagccttcgtaaccgcggctttgctggggcagcaagcgcttcctgccgacgccgcccgcctggtcggggcgaagctggatctcgacgaagacgccattctactgttgcagatgattccactgcgtggctgcattgatgaccgtattccaaccgacccaacgatgtatcgtttctatgaaatgttgcaggtgtacggcacaaccctgaaagcgttggttcatgagaagtttggcgatggcattatcagcgcgattaacttcaaactcgacgttaagaaagtggcggacccggaaggtggcgaacgtgcggtcattaccttagatggtaaatatctgccgaccaagccgttctgacagccatgcgcaatcatcaaaagacgttcacgatgctgctggttctggtgctgattggtcttaatatgcgaccactgctcacctccgtcgggccactgctaccgcaattgcgccaggcgagcggaatgagctttagcgtggctgccctgttgaccgctcttccggtggtcaccatgggcgggctggcgctggccggaagctggcttcatcagcatgtcagcgaacgtcgcagtgtcgccatcagtctgttgctgattgccgtcggtgcattgatgcgtgagctttacccccaaagtgcgctgctgcttagcagcgcactgcttggtggggtggggatcggcatcattcaggcggtgatgccttcggtgattaaacggcggtttcagcagcgcacgccactggtgatggggctgtggtccgcggctctgatgggcggcggtggacttggtgccgccataacgccctggttagttcaacatagcgaaacctggtatcaaacactcgcctggtgggcgctgcctgccgttgttgcgctctttgcctggtggtggcaaagcacccgcgaggtcgcctcttcccacaagacaacaaccactccggttcgcgtggttttcactcctcgcgcgtggacgctgggtgtttactttggtctgattaacggtggttacgccagcctgattgcctggttacccgccttctatattgagattggtgccagcgcgcagtacagcggttccttgctggcattgatgacgcttgggcaagccgcaggagctttgctgatgcctgctatggctcgccatcaggatcggcgcaaactgttaatgctggcgctggtgttacaactggtggggttctgcggctttatctggctgccgatgcaattgccggtattgtgggcgatggtgtgtgggttaggtctgggcggcgcgtttccgctctgtttgctgctggcgctcgatcactctgcgcaaccggctattgctggcaagctggtggcgtttatgcaggggatcggttttatcatcgccgggcttgccccgtggttttctggcgtgctgcgtagtatcagcggcaattacctgatggactgggcgtttcatgcgctgtgcgtcgttgggctgatgatcataaccctgcgttttgcaccagcacgttttccgcagctgtgggtcaaagaggcatgatgcgacgcttgttcctgcgctttgttcatgccggatgcggctaatgtagatcgctgaacttgtaggcctgataagcgcagcgtatcaggcaatttttataatttaaactgacgattcaactttataatctttgaaataatagtgcttatcccggtcgtttatttcgcgaataacccgacaaggaacgccagccgccacgacgtttggtggaatgtcttttgtgacgatactacccgcgccaataacagaattatccccgatggtgacgcctggattaataaccacatgacttccgatccagacgttattgccaatcgttatcggaaaagagtacatctcgccgttttttctcaattcatggtgtacagggtgtcccgtaacggaaagagtaacgttgggtgcaatcagtacgttatcaccgattattaccgtgtagtcatcgacaatggttaaattgaaatttgcataaaaattgcggcctatatggatgttggaaccgtaagagaaatagacaggcggttctacccaggcgttttcccctaccgtggcaaacatttctttaatcaggctttctcttttttcaacttctgatggatgcgagtgattaaactcatacattaacgttttcccacgaagtcttttttccggtaagccttcgcacatatcggtaaatagcttgcctgctcttattctttcggtcattggcatgttcaatgcgatcactccgttatgatatgttggtcggataaggcgctcgcgccgcatccgacattaattgcttaagcgacttcattcacctgatgacgcagcagggaaagcgggccggggccgctaagcgtgaacacggaaattaaggtgaagcccagcgccaccagacccagcaccagataagcgccctggaaaccgatgctttcatacatattgcccgccagtacagacataaaaatcatcgccagttgcttaaagaagcagaaacagaccagataaatcgtcgctgaaaaacgcacttcaaactggctggtaatatatttaaagcagcccaccagcaggaacggtacttcaaacatatgcagcgttttcagaataaccacttccagcgctgaggtggcgaacgatgagccaataatacgtacagacataatagtgccagccagcagcagggcgtttttcccaccgatgcgattaatgatcagtggcgcaaagaacataatcgaggcgttaagtaattcgcccattgtcgttacgtagccaaatacccgcgtaccctgttcaccggtagcaaagaacgaagtaaagaaattagcaaactgttggtcaaaaacatcgtaggtgcaggaaacgccaataacatacagtgacaaaaaccacagttttggctgtctgaacagttccagcgccagcttaaggctaaatgccgaatggttggcacctaccgcattggcaaccgtgacggaagagggcgcatccgttttggcgaaaaagagtaaaacggcgaggatgagtgcacagccagaacccagccagaaaacaaactgattattgatggtgaacatgatgccgacaatcgaggcacacagcgcccagccaacacagccaaacatccgcgcgcgaccaaattcgaaattactgcgacggctgactttctcaataaatgcctctactgctggcgcaccggcgttaaaacagaaaccaagataaataccaccaacaatcgaccctactaaaatgttgtattgtaacagcgggccgaagataaaaataaagaacggcgcaaacatcactaacatgccggtaataatccacagcaggtatttgcgcagcccgagtttgtcagaaagcagaccaaacagcggttggaataatagcgagaacagagaaatagcggcaaaaataatacccgtatcacttttgctgatatggttgatgtcatgtagccaaatcgggaaaaacgggaagtaggctcccatgataaaaaaataaaagaaaaagaataaaccgaacatccaaaagtttgtgttttttaaatagtacataatggattgccttacgcgaaatacgggcagacatggcctgcccggttattattatttttgacaccagagcaactggtaatggtagcgaccggcgctaagctggaattccgccgacactgacgggctccaggagtcgtcgccaccaatccccatatggaaaccgtcgatattcagccatgtgccttcttccgcgtgcagcagatggcgatggctggtttccatcagttgttgttggctgtagcgactgatattgaactggaagtcgccgcgccactggtgtgggccataattcaattcgcgcgtcccgcagcgcagaccgttttcgctcgggaagacgtacggggtatacatgtctgacaatggcagatcccagcggtcaaaacaggcggcagtaaggcggtcgggatagttttcttgcggccctaatccgagccagtttacccgctctgctacctgcgccagctggcaggtcaggccaatccgcgccggatgtggcgtattgctcgccacttcaacatcaacggtaatcgccatttgaccactaccatcaatccggtaggttttccggctgataaataaggttttcccctgatactgccacgcgtggacagtggtaatcagcaccgcgtcggcaagtgtatctgccgtgcactgcaacaacgccgcttcggcctggtaatggcccgccgccttccagcgttcgacccaggcgttcgggtcaatgcgggtcgcttcacttacgccaatgtcgttatccagcggcgcgcgggtgaactgatcgcgcagcggcgtcagcagttgttttttatcgccaatccacatctgtgaaagaaagcctgactggcggttaaattgccaacgcttattacccagctcgatgcaaaaatccatttcgctggtggtcagatgcgggatggcgtgggacgcggcggggagtgtcacgctgaggttttccgccagacgccactgctgccaggcgctgatgtgtccggcttctgaccatgcggtcgcgttcggttgcactacgtgtacagtaagccagagttgtccggcgctctccggctgcggtagttcaggcagttcaatcaactgtttaccttgtggagcgacatccagaggcacttcaccgcttgccagcggcttgccatccagcgccaccatccagtgcaggagctcgttatcgctatgacggaacaggtattcgctggtcacttcgatggtttgcccggataaacggaactggaaaaactgctgctggtattttgcttccgtcagcgccggatgcggcgtgcggtcggcaaagaccagaccgttcatgcagaactggcgatcgttcggcgtatcgccaaaatcaccgccgtaagccaaccacgggttgccgttttcatcatatttaatcagcgactgatccacccagtcccagacgaagccgccctgtaaacggggatactgacgaaacgcctgccagtatttagcgaaaccgccaagactgttacccattgcgtgggcatattcgcaaaggatcagtgggcgcagttctccaggcagcgaaagccattttttgatggaccatttcggcaccgccgggaagggttggtcttcatccacgcgcgcgtacatcgggcaaataatatcggttgcgaaggtgtcggctccgccgccttcatactgcaccgggcgggaaggatcgacagatttgatccagcgatacagcgcgtcgtgattagcgccgtggcctgattcattccccagcgaccagatgatcacactcgggtgattacgatcgcgctgcaccattcgcgttacgcgttcgctcatcgccggtagccagcgcggatcatcggtcagacgattcattggcaccatgccgtgggtttcaatattggcttcatccaccacatacaggccgtagcggtcgcacagcgtgtaccacagcggatggttcggataatgcgaacagcgcacggcgttaaagttgttctgcttcatcagcaggatatcctgcaccatcgtctgctcatccatgacctgaccatgcagaggatgatgctcgtgacggttaacgcctcgaatcagcaacggcttgccgttcagcagcagcagaccattttcaatccgcacctcgcggaaaccgacatcgcaggcttctgcttcaatcagcgtgccgtcggcggtgtgcagttcaaccaccgcacgatagagattcgggatttcggcgctccacagtttcgggttttcgacgttcagacgtagtgtgacgcgatcggcataactaccacgctcatcgataatttcaccgccgaaaggcgcggtgccgctggcgacctgcgtttcaccctgccataaagaaactgttacccgtaggtagtcacgcaactcgccgcacatctgaacttcagcctccagtacagcgcggctgaaatcatcattaaagcgagtggcaacatggaaatcgctgatttgtgtagtcggtttatgcagcaacgagacgtcacggaaaatgccgctcatccgccacatatcctgatcttccagataactgccgtcactccagcgcagcaccatcaccgcgaggcggttttctccggcgcgtaaaaatgcgctcaggtcaaattcagacggcaaacgactgtcctgaccgtaaccgacccagcgaccgttgcaccacagatgaaacgccgagttaacgccatcaaaaataattcgcgtctggccttcctgtagccagctttcatcaacattaaatgtgagcgagtaacaacctgtcggattctccgtgggaacaaacggcggattgaccgtaatgggataggtcacgttggtgtagatgggcgcatcgtaaccgtgcatctgccagtttgaggggacgacgacagtatcggcctcaggaagatcgcactccagccagctttccggcaccgcttctggtgccggaaaccaggcaaagcgccattcgccattcaggctgcgcaactgttgggaagggcgatcggtgcgggcctcttcgctattacgccagctggcgaaagggggatgtgctgcaaggcgattaagttgggtaacgccagggttttcccagtcacgacgttgtaaaacgacggccagtgaatccgtaatcatggtcatagctgtttcctgtgtgaaattgttatccgctcacaatttcacacaacatacgagccggaagcataaagtgtaaagcctggggtgcctaatgagtgagctaactcacattaattgcgttgcgctcactgcccgctttccagtcgggaaacctgtcgtgccagctgcattaatgaatcggccaacgcgcggggagaggcggtttgcgtattgggcgccagggtggtttttcttttcaccagtgagacgggcaacagctgattgcccttcaccgcctggccctgagagagttgcagcaagcggtccacgctggtttgccccagcaggcgaaaatcctgtttgatggtggttaacggcgggatataacatgagctgtcttcggtatcgtcgtatcccactaccgagatatccgcaccaacgcgcagcccggactcggtaatggcgcgcattgcgcccagcgccatctgatcgttggcaaccagcatcgcagtgggaacgatgccctcattcagcatttgcatggtttgttgaaaaccggacatggcactccagtcgccttcccgttccgctatcggctgaatttgattgcgagtgagatatttatgccagccagccagacgcagacgcgccgagacagaacttaatgggcccgctaacagcgcgatttgctggtgacccaatgcgaccagatgctccacgcccagtcgcgtaccgtcttcatgggagaaaataatactgttgatgggagtctggtcagagacatcaagaaataacgccggaacattagcgcaggctgcttccacagcagtggcatcctggtcatccagcggatagttaatgagcagcccactgacgcgttgcgcgagaagattgtgcaccgccgctttacaggcttcgacgccgcttcgttctaccatcgacaccaccacgctggcacccagttgatcagcgcgagatttaatcgccgcgacaatttgcgacggcgcgtgcagggccagactggaggtggcaacgccaatcagcaacgactgtttgcccgccagttgttgtgccacgcggttgggaatgtaattcagctccgccatcgccgcttccactttttcccgcgttttcgcagaaacgtggctggcctggttcaccacgcgggaaacggtctgataagagacaccggcatactctgcgacatcgtatagcgttactggtttcacattcaccaccctgaattgactctcttccgggcgctatcatgccataccgcgaaaggttttgcgccattcgatggtgtcaacgtaaatgcacgccgcttcgccgtccggctaccagaatagcctgcgattcaaccccttcttcgatctgttttgctacccgttgtagcgccggaagatgcttttccgcggcctgttcaatggtcattgcgctcgccatatacaccagattcagacagccaatcacccgttgttcactgcgcagcggtacggcgatagaggcgatcttctcctcctgatcccagccgcggtagttctgtccgtaaccctctttgcgcgcgcgcgccagaatggcttccagctttaacggttctcgtgccagttgatagtcatcaccggggcgggcggctaacatttcgattaattccttgcgttcttgttccgggcaaaaggccagccaggtcaggcccgaggcggttttcagaagcggcaaacgtcgcccgaccattgcccggtgaaaggataagcggctgaaacggtgagtggtttcgcgtaccaccattgcatcaacatccagcgtggacacatctgtcggccataccacttcgcgcaacagatcgcccagcagtggggccgccagtgcagaaatccactgttcgtcacgaaatccttcgcttaattgccgcactttgatggtcagtcgaaaactatcatcggaggggctacggcggacatatccctcttcctgcagcgtctccagcagtcgccgcacagtggtgcgatgcaggccgctgagttccgccagcagcccgacgctggcaccgccatcaagtttatttaacatatttaataacattagaccgcgggttaagccgcgcacggttttgtattccgtctgctcagtgttctgcatattaattgacatttctatagttaaaacaacgtggtgcacctggtgcacattcgggcatgttttgattgtagccgaaaacacccttcctatactgagcgcacaataaaaaatcatttacatgtttttaacaaaataagttgcgctgtactgtgcgcgcaacgacattttgtccgagtcgtgaggtactgaaatggcaatacaacaccctgacatccagcctgctgttaaccatagcgttcaggtggcgatcgctggtgccggcccggttgggctgatgatggcgaactatctcggccagatgggcattgacgtgctggtggtggagaaactcgataagttgatcgactacccgcgtgcgattggtattgatgacgaggcgctgcgcaccatgcagtcggtcggcctggtcgatgatgttctgccgcacactacgccgtggcacgcgatgcgttttctcaccccgaaaggccgctgttttgctgatattcagccaatgaccgatgaatttggctggccgcgccgtaacgcctttattcagccgcaggtcgatgcggtgatgctggaaggggtgtcgcgttttccgaatgtgcgctgcttgttttcccgcgagctggaggccttcagtcagcaagatgacgaagtgaccttgcacctgaaaacggcagaagggcagcgggaaatagtcaaagcccagtggctggtagcctgtgacggtggagcaagttttgtccgtcgcactctgaatgtgccgtttgaaggtaaaactgcgccaaatcagtggattgtggtagatattgccaacgatccgttaagtacgccgcatatctatttgtgttgcgatccggtgcgcccgtatgtttctgccgcgctgcctcatgcggtacgtcgctttgaatttatggtgatgccgggagaaaccgaagagcagctgcgtgagccgcaaaatatgcgcaagctgttaagcaaagtgctgcctaatccggacaatgttgaattgattcgccagcgtgtctacacccacaacgcgcgactggcgcaacgtttccgtattgatcgcgtactgctggcgggcgatgccgcgcacatcatgccggtatggcaggggcagggctataacagtggtatgcgcgacgcctttaacctcgcatggaaactggcgttggttatccaggggaaagcccgcgatgcgctgctcgatacctatcaacaagaacgtcgcgatcacgccaaagcgatgattgacctgtccgtgacggcgggcaacgtgctggctccgccgaaacgctggcagggtacgttacgtgacggcgtttcctggctgttgaattatctgccgccagtaaaacgctacttcctcgaaatgcgcttcaagccgatgccgcaatattacggcggtgcgctggtgcgtgagggcgaagcgaagcactctccggtcggcaagatgtttattcagccgaaagtcacgctggaaaacggtgacgtgacgctgctcgataacgcgattggcgcgaacttcgcggtaattggctggggatgcaatccactgtggggatgagcgacgagcaaatccagcagtggcgcgcgttgggcacacgcttcattcaggtggtgccggaagtgcaaattcataccgcacaggataaccacgacggcgtgctacgcgtgggcgatacgcaaggtcgtctgcgtagctggttcgcgcaacacaatgcttcgctggtggtgatgcgcccggatcgctttgttgccgccaccgccattccgcaaaccctgggcaagaccctgaataaactggcgtcggtgatgacgctgacccgccctgatgccgacgtttctgtcgaaaaggtagcctgatatgcacgcttatcttcactgtctttcccactcgccgctggtggggtatgtcgacccggcgcaagaggtgctcgatgaggtcaatggcgtgattgccagcgcccgcgagcgtattgcggctttctcccctgaactggtggtgctgtttgcgcctgatcactacaacggctttttctatgacgtgatgccaccgttctgtttaggcgttggagcgacggcaattggtgatttcggcagtgcggcaggagagctgcccgtgcctgtggagctggcggaggcctgtgcgcatgccgtcatgaagagcgggatcgatcttgccgtttcttactgtatgcaggtggaccacgggttcgcccagccactggagttcctgctcggcgggctgtataaggtgccagttctgcctgtgttcatcaacggtgtcgccacgccgctgcccggtttccagcgtacccgcatgttgggtgaagccattggacgtttcaccagcactctcaataaacgcgtgctgttcctgggttccggtgggctttcccatcagccgccggtgcccgaactggcgaaagccgatgcccatatgcgcgaccgtctgttggggagcgggaaagatttacccgccagtgagcgcgaattgcgtcagcaacgggtgattagcgccgctgagaagtttgttgaggatcagagaactctgcatccgctcaacccgatttgggataaccagttcatgactttgctggagcagggacgcatacaggaactggatgccgtcagtaacgaagagctttccgccattgccggaaagtcgacacatgaaatcaaaacctgggtcgccgcttttgccgctatttctacatttggcaactggcgtagcgaagggcgttattaccgcccaatcccggagtggattgccggatttggctcgttaagcgccagaacagagaactgaatatgcaggagaagatgatgagttatcagccacaaaccgaagccgccaccagccgttttctgaatgtagaagaagcgggtaaaacgctgcgcatccattttaatgactgcggacaaggcgacgaaaccgttgtcctgctgcacggttccggcccgggtgctactggctgggcgaacttcagccgcaatatcgatccgctggtagaggcgggctatcgggtgatcctgctggattgtccgggttggggcaaaagcgattcgatcgttaatagtggttcacgatcggatcttaatgcacgaatcctgaaaagcgtggtggatcaactggatatcgccaaaatccacctgctgggcaactcgatgggcggccatagttctgtggcgttcacccttaactggccggagcgcgtcggcaaactggtgctgatgggcggcggtacgggcggcatgagtttgtttacgccgatgccaaccgaaggtattaagcgactgaatcagctttatcgtcagccgactatcgaaaacctgaagctgatgatggatatcttcgttttcgataccagcgatttgaccgacgccctgtttgaagcgcgcctgaataatatgctgtcgcgccgcgatcacctggaaaacttcgttaagagcctggaagctaatccgaaacagttcccggattttggcccacgtctggcggaaatcaaagcgcaaaccctgattgtctgggggcgcaacgaccgcttttgtgccgatggatgcgggtctgcgtctgctgtccggcattgccggttctgaactgcatatcttccgcgactgtggtcactgggcgcagtgggaacatgccgacgctttcaatcaattggtgctgaatttcctcgcacgcccttaaggaatggtcatgacgaagcatactcttgagcaactggcggcggatttacgccgcgccgcagagcagggcgaagcgattgcgccgctgcgcgatctgattggtatcgataacgctgaagcggcctacgccattcagcacataaatgtgcaatatgacgttgcgcaggggcgtcgcgtggtagggcgtaaagtgggcctgacgcatccgaaagtgcagcaacaactgggcgttgatcaaccggatttcgggacattatttgccgacatgtgttatggcgataacgaaatcattcctttttcccgtgttctgcaagcccgcattgaagcggagatcgcactggtgttgaaccgcgatttgcccgcaaccgatatcaccttcgacgaattgtataacgccattgaatgggtacttccggcgctggaggtggtgggtagccgcattcgcgactggtcgattcagtttgtcgataccgtggcagataacgcttcctgcggggtgtatgtcatcggcggtccggcgcaacgtccggcggggttagacctgaaaaactgcgccatgaagatgacgcgtaataacgaagaggtttccagcgggcgcggcagcgaatgcctgggacatccgcttaatgccgccgtctggctggcacgcaaaatggccagcctgggtgaaccgctgcgcgccggagatatcattcttaccggggcattaggtccgatggtggcagtgaatgcgggcgatcgttttgaagcccatattgaaggcataggttcagttgctgcgacattttcaagcgcagccccaaaaggaagtctgtcatgagtaagcgtaaagtcgccattatcggttctggcaacattggcaccgatctgatgattaaaattttgcgtcacggtcagcatctggagatggcggtgatggtcggcattgatcctcagtccgacggtctggcgcgtgccagacgtatgggcgtcgccaccacccatgaaggggtgatcgggctgatgaacatgcctgaatttgctgatatcgacattgtatttgatgcgaccagcgcgggcgcgcatgtgaaaaacgatgccgctttacgcgaagcgaaaccggatattcgcttaattgacctgacgcctgctgccatcggcccttactgcgtgccggtggttaacctcgaggcgaacgtcgatcaactgaacgtcaacatggtcacctgcggcggccaggccaccattccaatggtggcggcagtttcacgcgtggcgcgtgttcattacgccgaaattatcgcttctatcgccagtaaatctgccggacctggcacgcgtgccaatatcgatgaatttacggaaaccacttcccgagccattgaagtggtgggcggcgcggcaaaagggaaggcgattattgtgcttaacccagcagagccaccgttgatgatgcgtgacacggtgtatgtattgagcgacgaagcttcacaagatgatatcgaagcctcaatcaatgaaatggctgaggcggtgcaggcttacgtaccgggttatcgcctgaaacagcgcgtgcagtttgaagttatcccgcaggataaaccggtcaatttaccgggcgtggggcaattctccggactgaaaacagcggtctggctggaagtcgaaggcgcagcgcattatctgcctgcctatgcgggcaacctcgacattatgacttccagtgcgctggcgacagcggaaaaaatggcccagtcactggcgcgcaaggcaggagaagcggcatgaacggtaaaaaactttatatctcggacgtcacgttgcgtgacggtatgcacgccattcgtcatcagtattcgctggaaaacgttcgccagattgccaaagcactggacgatgcccgcgtggattcgattgaagtggcccatggcgacggtttgcagggttccagctttaactatggtttcggcgcacatagcgaccttgaatggattgaagcagcggcggatgtggtgaagcacgccaaaatcgcgacgttgttgctgccaggaatcggcactattcacgatctgaaaaatgcctggcaggctggcgcgcgggtggttcgtgtggcaacgcactgtaccgaagctgatgtttccgcccagcatattcagtatgcccgcgagctcggaatggacaccgttggttttctgatgatgagccatatgaccacgccggagaatctcgcaaagcaggcaaagctgatggaaggctacggtgcgacctgtatttatgtggtggattctggcggtgcgatgaacatgagcgatatccgtgaccgtttccgcgccctgaaagcagagctgaaaccagaaacgcaaactggcatgcacgctcaccataacctgagtcttggcgtggcgaactctatcgcggcggtggaagagggctgcgaccgaatcgacgccagcctcgcgggaatgggcgcgggcgcaggtaacgcaccgctggaagtgtttattgccgccgcggataaactgggctggcagcatgggaccgatctctatgcgttaatggatgccgccgacgacctggtgcgtccgttgcaggatcgaccggtacgagtcgatcgcgaaacgctggcgctgggatacgctggtgtttactcgagcttcctgcgtcactgtgaaacggcggcggcgcgttatggcttaagtgcggtggatattctcgttgagctgggcaaacgccggatggttggcggccaggaggatatgatcgttgacgtggcgctggatctgcgcaacaacaaataatgatgactgccgagaacgtgcattttgtatgcccatcccagcacgactgccggatgcggcgtgaacgccttatccggcctacatttcgcccgtaggcagtcattaaatagttctgattacgcggctggcaatgtatcagtcgcgattcacctgcactcgcaatgaggttcatcttatgtcgactcgtaccccttcatcatcttcatcccgcctgatgctgaccatcgggctttgttttttggtcgctctgatggaagggctggatcttcaggcggctggcattgcggcgggtggcatcgcccaggctttcgcactcgataaaatgcaaatgggctggatatttagcgccggaatactcggtttgctacccggcgcgttggttggcgggatgctggcagaccgttatggtcgtaagcgtattttgattggctcagttgcgctgtttggtttgttctcactggcaacggcgattgcctgggatttcccctcactggtctttgcgtggctgatgaccggtgtcgggctgggggcggcgttgccgaatcttatcgccctgacgtctgaagccgcgggtccacgttttcgtgggacggcagtgagcctgatgtattgcggtgttcccattggcgcggcgctggcggcgacactgggtttcgcgggggcaaacttagcatggcaaacggtgttttgggtaggtggtgtggtgccgttgattctggtgccgctattaatgcgctggctgccggagtcagcggttttcgctggcgaaaaacaggctgcgccaccactgcgtgccttatttgcgccagaaacggcaaccgcgacgctgctgctgtggttgtgttatttcttcactctgctggtggtttatatgttgatcaactggctaccgctacttttggtggagcaaggattccagccatcgcaggcggcaggggtgatgtttgccctgcaaatgggtgcggcaagcgggacgttaatgttgggcgcattgatggataagctgcgtccagtgaccatgtcgctactgatttatagcggcatgttagcttcgctgctggcacttggaacggtgtcgtcatttaacggtatgttgctggcgggatttgtcgcggggttgtttgcgacaggtgggcaaagcgttttgtatgccctggcaccattgttttacagttcgcagatccgcgcaacaggtgtgggaacagccgtggcggtagggcgtctgggggctatgagcggtccgttactggccgggaaaatgctggcattaggcactggcacggtcggcgtaatggccgcttctgcaccgggtattcttgttgctgggttggcggtgtttattttgatgagtcggagatcaagaatgcagccgtgtgccgatgcctgacgcgccttattaagcaggggcgaaagggagttgcccccaatacacccacggcgtttacaggtatactcgctaaaaattattcagcgggtttggaaacaaagatggcaaaacttaccttacaagagcagttgctcaaagcaggattagtcaccagcaaaaaagcggcgaaggtggagagaacggcgaaaaaatcgcgcgttcaggcgcgtgaagctcgggcggcggtagaagaaaataaaaaggcacagcttgagcgtgataaacagcttagcgagcaacaaaaacaagctgcgttggcgaaagaatataaagctcaggtgaagcagctcattgaaatgaaccgaatcaccattgccaatggcgatattggttttaacttcactgacggcaatctgattaagaagatttttgtcgataagctcacacaggcgcagttgattaatggtcgtctggcgattgcccgcttgttggtcgataacaatagcgaaggtgaatacaccattattcccgccagtgttgccgataaaattgctcagcgtgatgccagcagtattgtgttgcacagcgcgctcagtgccgaagagcaggatgaagacgatccgtatgccgacttcaaagtgcctgatgatttgatgtggtaaacatagataagtcgtgcgcagatgcctgatgcgacgctatgcgcgtcttatcagtryctaygkrttatssgtccagtgcagagaaaatcggccagttttctctgcctgcagtccgcatgccgtatcgggccttgggttctaacctgttgcgtagatttatgcagcggactgcctttctcccaaagtgataaaccggacagtatcatggaccggttttcccggtaatccgtatttgcaaggttggtttcactatggaacatgaacttcattatatcggtatcgacaccgctaaagagaaactggatgtcgatgtgttgcgtcctgatggtcgtcatcgcaccaaaaaattcgctaacaccactaaagggcacgatgagctggtgagctggctgaaaggtcacaagattgaccatgcgcatatctgcatcgaagcgaccggcacctatatggaacctgtcgctgagtgcctttacgatgctggctacatagtgtcagtcattaatcctgcgctgggtaaagctttcgctcagagtgaaggactgcgtaacaagactgataccgtggatgcgcgcatgctggcagagttctgtcgtcagaagcgccctgcagcctgggaagcgcctcacccgcttgaacgcgcgttgcgtgccctggtagtccgccaccaggcgctgacagatatgcacacgcaggaactgaatcgcactgaaacggcgcgggaagtccagagaccgagcattgatgctcaccttctgtggcttgaagcagagctgaagcgtcttgagaagcagataaaagacctgacagacgatgatccggatatgaaacaccgcaggaaactgctggaaagcatcccgggtatcggagagaaaacatctgcggtattgctggcttatatcggtctgaaggaccgcttcgcccatgccagacagttcgccgcttttgcgggtctgacaccacggcgttatgaatcaggtagcagtgtgagaggggcgagccggatgagtaaggccggacatgtgtcgcttcgcagggcgttgtatatgcccgcaatggtagccaccagtaagactgagtggggacgggcgttccgcgaccgtctggcggctaatggcaagaaaggaaaggtgattctcggcgcgatgatgcgcaagctggcacaggtggcgtatggagtgctgaagtcaggcgtgccgttcgatgcgtcacggcataatccggtagcggcgtaaaaatcgcggaagggatgaaaaaaacagcgcctgacggcgctgtgtctggcatgcctgcaatccgggaaaccggaccaggaaaaarctatgcrsgycwtatcagtatctacggtttatgggcgaagtgtaggccggataaggcgttcacgccgcatccggcagtcgtgcgccatgcctgatgcgacgctttgcgcgtcttatcaggcctacggtttacgggcgaagtgtaggccggataaggcgttcacgccgcatccggcagtcgtgcactattatcaacgcatattcagtttattggcgtggtaggcaatatgctcgccaataaaactggagacaaaataatagctgtggtcgtaaccctcgtgataacggattaacgtcttgatattcatctcctggcagatcttttcaagatttggagtccgcagctgttccgcgtaaaaatcatcactcaacccctgatcaaccatgatttccgcaacgcgttgaccttgtgaaataagactcaccggatcgtaatccaaccaggcatctttattttcaccaagatatgcggcaaaggcttgctgtccccacggtacttgcgatggggagacaatgggcgaaaacgccgagacgctgacatattcatctgggttacgtaacgccagcaccagcgcgcccagcccgcccatagaatgaccagagatagactttctggtcgttgccggaaaatgttgcatcactaaatccggcagctcgttgcggatatagtcatacattttgtaatgttcattccacggcgcttgcgttgcgttcaggtaaaacccggcaccttgcccgagatcgtaacggtcggcatctgcgacatgactgcctcgcggactggtgtccggcgcaacaacaataatgttgtgttcagccgcgtaacgctgcatccccgatttagtaatgaaattctgctcgttgcaggtcaggcccgaaagccagtacagcaccggcaatttttcattcgcggcttttggtgggagatagacgccgacattcatttcacatttcagtgattgggaataatgccgatacacattttgccagccgccaaagctggcatgtttttcaatgagttccatcagtcattatctcacggttaatcccccggacggctgcccagggagagtattaagaaccccgtctgaagtggacggggtatacctgcgggaaatcagtaacgaattacggttcgaatggatttgccttcatgcatcaggtcgaaggcgtcattaatttcatcaaggctcatggtatgcgtgacaaacggttccagatcgatatcacctttcatcgcatcttcaaccatacccggtaactgggaacgacctttcacgccgccaaacgcggaacctttccatacgcgaccagtgaccaactggaatggacgggtggagatttcctgaccagaacctgccaccccgatgatcaccgactgaccccagccgcggtgcgcactttccagcgccgcacgcatcacgttgacgttaccgatgcattcaaaggtatggtcgataccccatttgttgatatccagcaggacatctttaatcggtttgtcgtagtcattcgggttaatgcagtcggtagcaccgaagcgacgcgccagatcgaatttcttcgggttggtatcgatagcgataatccgtcccgctttcgcctgacgcgcgccctgaaccactgccagaccaatcgcgccaagaccaaacacggcaacagaatcacctggctggactttagctgtgttgtgcaccgcgccaataccggtggtcacgccacagcccagcagacagacgtgttcatggtttgcttctggattaattttggccagagacacttccgcgaccacggtgtattcactgaatgtagagcaccccatgtagtgataaagcggctgcccgttgtaagaaaaacgggtggtgccgtctggcatcaagcctttaccctgggtttcgcgaaccgcaacacagaggttagttttgccagaacgacagaactcacactcgccgcactccgcggtgtaaagcgggatcacatggtcgccaggtttgacgctggttacgccttcaccgacttcaaccacaacgccggccccttcgtgaccgagaaccaccgggaatacaccttccgggtcatccccggagagggtaaatgcgtcggtatggcaaacgccggtatgggtgactttaatcagcacttcaccttttttcggtggtgcaacgtcaatttcaacgatttccagcggtttaccgggagcaaatgcaacggcagcacgtgatttcatctctcgctcttcctcaatatggtaatagattcagctatttaagataggctcgaaccagttcaatagtgtcgtcaacggattggctgacttcgcggctgtagcagtcatttcggtcaaacgtttcccggatatggctttcaagcacttctgccatcagcccgttagccgcgccccgaacggcagcgatctgttggagtatggcacggcattcggcatcaccctccagcgaccgttccagagcatcaatctgccctcgaatacgacgaactcgagtaaggacctttttcttctcttccggagtactgggcatttcgcacctcatcatctgcacgcaatatactataggggggtatgctatatgtcaatgcatacccccntatagtatataacactggagaataaaatttatccggtgaatgtggtcggaaaacaaagaggaaaggggggggctaatcggcagggaaggccgccccggatagcgggcggcagaaggaatcagaatttccaggtcagatgggctgcaagttgcagaccgttataatcatcggttggggtgtcgtaccacactttacctgccgtcagcccgagattaagttgctcagtcagcggttgaatacgttgcagactgacgctcttcatgctgccgtagcgtgtttctggcgtccagtcataggtgtaagcgcctgttccgcggcttagccatagttgcgtataaccagtgccgcgcgggtcattcagacgcacggaaatcatattgctataactaccacctgcatcgctggagtcataatgggtatagcggtagctggtgatcaccgggccagtatagagtgatacgccgccttgccaggcatcgacttcgacatcatcgtaatatttagtgtagcgataaccggtcgtgaaaagcgtttttggcaacagggccaggttaatatcctgacgaaaattctggcgggcaaagaccggcgtattatccgcaaaggcaatacccgttcgggttgtcagccagttattccatttataccagaccgcaccctgaccgcgagtggcattgaaatgttcagtttcataatcacgacgcccctgggaaagattaaaaagcagcgttgcgttttcaactttcgccaccagttcagcatacgctaaattacggttgccatgatcgccagaataatcggtaaaatcgtagcccgcggtaatggaagttaacccggcataagcgggcaatgcgctaaaaatggccgccgctaataacgtccgttttatcattttaatctcctgtacggataagttcttgtcggagtgaataagttccggcaggtaaattacgttctacaatcacgcgcgggccaagttgcgtgttcggggaaataattcgcccaggcaaaattataacttgtacgccaaggcgtgaacgctgcccgatataacaacctaatttatcgcatccggtagcgataattccctctggagttcgaacagacacaggctgttcatccagacgatgattactggtacgtacttgtgcgcccaaatatgcctggtttgcaactaccgagtcggcaataaaacattgcggaccaatcgttgcttccgcttcaataaccgcatttttaatttcggtggcaaaaccaatttttacaccattgctgattattgtgccaggacgaataaacgcataattacctatcaggcagtttgcgccaatcactaccggaccctgaataacggcaccatgacaaatacgggtattcgcgccgataacaacttcacctgcagtttcatcaataattacctggtctgcaatctgaatatttttctctttaacattaagcttcagatagtttttcagttcctgtgacagaaggttgggaataagcggttgacgcttccaccagtgcggaatagcgggtgggtttgtcgcgctgaggttcgcgtccagtaaaaaaggcaataagtccataaataatccagatggcataagctaataatacatacacaacggaaagcggcgctaaaggcaccaacaaccagcaacgatgaaaccaggcgctaaaagcaccaataacacaaactacgccgatccagataagcggaaacattgccaacaccacaccatgcggcccggtggtgatgaattcattaaaccaggtagtgagataaatcccaacgccataaatcacaaccaacagcataggaaatatactgaagataccgaagcggctaaataaaagtcttttatgcaggcgcatacagaccgcgtatcccacaatccaacgccgccagcgacgccactcctcacgcggactgttgcattcctgtgggtatacgatgcagcgattcgcctgccgaatacggtagccgtttgccactaatgtccaggtgagatcaaggtcttcgactttagtacgatctgagaaaccgaacttacgcaatacatcagtacggaacatcccgcaggcaccgctgataataaacggtgcgccgcccaggagctgctgtagcgtgcgcttcataacaatcatcggcaactttacggtcgcgcggatgtgcggtaacagccccgcgcctttcaacgcagtagagggaatgccgcctacggcatcagcaccgcgctcaatttctgccagcatatagcccattccgtcttgatcgggcggaacataggtgtcgccatcacttaaaaaaacctggtcgcaggtggcataattgaggccattcatcagcgcaccacctttaccggtatttttttgcgtgacggcaacaaagcggtcgccccatttgcgtttgacttccgccatgaccgcttcggtattgtccgtggagccgtcgttaacgcaaattacccggcaaaaataagggttacgcagtagattatccagtgactgcgccagacacgggccttcgttatacgcaggtataatggcgtcaatacagcctttcttttgactgggtttacgtcttagcgtacttaaaaaccatagcaacattgctatggacatacagataaatatccaggttttcatgcaatttgctcaaagaatcattttatgaattacaaagccttcacccagatcgctattgacctgttgcccgcgaaattgtgcaactgcacgcaggcgatcatgacgcatataatcacgtcgttcctggcttttatgtttttttaatgcagcaagtttgactgtgaaatattcttctttaacggattcaaaaacctgaggcataaatgaaagccaggtacttggggtttcgtagccgagaatttgtggaatagtgcggcaggcaaccattgaagcttgataaacagcgagatgatcctgatggcggtcggcatcatgcatggtatatacccgcatgatttcaacatcagaaggaatttgatttttaatgatgtcttccagagcggaaatcatatcattgagctgtaaatgagcgcgggtgtcagcaaaattaagatgaatagtttggtggcaccctaatatctttagggcgttgcgcgattcttcatggcgatcgattattccatctgtaccagagttgccggtagtcatcaccacggctgcgatataaattcctttttgcgcaagacgagcaagcgatgcgccacagcctaattctatatcgtcaggatgtgcgccaatagcaaggataccctttcttttatttgccgaagaaaggagggctgaatctaaaaccttatccacttaatgacactccattttatttattatactacaagcacaacgatgcactcagagacgtaatctctggcgcagccagatgttaatttataaatgttaaatgttgctaataactgaaaagcaagggctttcagacccggaggttcgactgggtaatgtttttatgcaattcatatgttaagtgtttgtatgtttggtatgtatagttattttgttttatacattgtatttagatgtgatttagtttgtcaattaattgcatttaaaaaatatgttctgtgaacaagtattgtttatatacattatgtgaatgtaatatgcgagtgattgagaatgatacagtgatatatacaatgcgaatataatagttttattatatgtattgatattgatagaaataatgaagtaataaatctcgtaatgtggttgtttatgcatcactaaaatgaagtgtagtaattttcccaattgttagaacggagtaattgcatatttaatctttcctttgccgtttttttgctaagaataaaatcatctgtgcgataacgactaattcttttaatgaatgtttttattcctgaatactgctcacataacaagacaggggagcagacaatcatggcaatttcatcgcgtaacacacttcttgccgcactggcattcatcgcttttcaggcacaggcggtgaacgtcaccgtggcgtatcaaacctcagccgaaccggcgaaagtggctcaggccgacaacacctttgctaaagaaagcggagcaaccgtggactggcgtaagtttgacagcggagccagcatcgtgcgggcgctggcttctggcgacgtgcaaatcggcaacctcggttccagcccattagcggttgcagccagccaacaggtgccgattgaagtcttcttgctggcgtcaaaactgggtaactccgaagcgctggtggtaaagaaaactatcagcaaacccgaagatttgattggcaaacgcattgccgtaccgtttatctccaccacccactacagcctgctggcggcgctgaaacactgggggattaaacccgggcaagtggagattgtgaacctgcagccgcccgcgattatcgccgcatggcagcggggtgatattgatggtgcttatgtctgggcaccggcggttaacgccctggaaaaagacggcaaggtgttgaccgattctgaacaggtcgggcagtggggtgcgccaacgctggacgtctgggtggtgcgcaaagattttgccgagaaacatcctgaggtcgtgaaagcgttcgctaaaagcgccatcgatgctcagcaaccgtacattgctaacccagacgcgtggctgaaacagccggaaaacatcagcaaactggcgcgtttaagcggcgtgccggaaggtgacgttccggggctggtgaaggggaatacctatctgacgccgcagcaacaaacggtagaactgaccggaccggtgaacaaagcgatcatcgacaccgcgcagtttttgaaagagcagggcaaggtcccggctgtagcgaatgattacagccagtacgttacctcgcgcttcgtgcaataaaaggaggcgcagatgctgcaaatctctcatctttacgccgattatggcggcaaaccggcactggaagatatcaacctgacgctggaaagcggcgagctactggtggtgctggggccgtccggctgcggtaaaaccacgttgctgaatctgattgccggttttgtgccttatcagcatggcagcattcaactggcgggtaagcgtattgagggaccgggagcagagcgcggggtggtttttcagaatgaagggctactaccgtggcgcaatgtacaggacaacgtggcgttcggcctgcaattggcaggtatagagaaaatgcagcgactggaaatcgcgcaccagatgctgaaaaaagtggggctggaaggcgcagaaaaacgctttatctggcagctttccggtggtcaacgtcagcgggtggggattgcccgcgcgctggcggcgaatccccagctgttattactcgacgaaccgtttggtgcgctggacgccttcacccgcgaccagatgcaaactctgctgctgaaactctggcaggagacgggcaagcaggtgctgttgattacccacgatatagaagaagcggtgtttatggcgactgaactggttctgctttcatccggccctggccgtgtgctggagcggctgccgctcaactttgctcgccgctttgttgcgggagagtcgagccgcagcatcaagtccgatccacaattcatcgccatgcgcgaatatgttttaagccgcgtatttgagcaacgggaggcgttctcatgagtgtgctcattaatgaaaaactgcattcgcggcggctgaaatggcgctggccgctctcgcgtcaggtgaccttaagcattggcacgttagcggttttactcactgtatggtggacggtggcgtcgctgcaactgattagcccgctgtttttgccgccgccgcaacaagtactggcaaaactgctcaccattgccggaccgcagggatttatggacgccacgctgtggcagcatctggcagccagcctgacgcgcattgtgctggcgctactcgcggcggtggtgatcggtattccggtcgggatcgccatggggctaagcccgacggtgcgcggcattctggatccggtaatcgaactttatcgtccggtgccgccgctggcttatttgccgctgatggtgatctggtttggtattggtgaaacctcgaagatcttactgatctatttagcgattttgcaccggtggcgatgtcggcgctggcgggggtgaaaagcgcgcagcaggttcgcattcgtgccgcccagtcgctgggtgccagccgtgcgcaggtgctgtggtttgtcattttgcccggcgcgctgccggaaatcctcaccggattacgcattggtctgggtgtgggctggtctacgctggtagcggcggagctgattgccgcgacgcgcggtttaggatttatggttcagtcagcgggtgaatttctcgcgactgacgtggtgctggcggggatcgcggtgattgcgattatcgcctttcttttagaactgggtttgcgcgcgttacagcgccgtctgacgccctggcatggagaagtacaatgagtgaacgtctgagcattaccccgctggggccgtatatcggcgcacaaatttcgggtgccgacctgacgcgcccgttaagcgataatcagtttgaacagctttaccatgcggtgctgcgccatcaggtggtgtttctgcgcgatcaaactattacgccgcagcagcaacgcgcgctggcccagcgttttggcgaactgcatattcaccctgtttaccctcatgccgaaggggttgacgagatcatcgtgctggatacccataacgataatccgccggataacgacaactggcataccgatgtgacatttattgaaacgccacccgcaggggcgattctggcagctaaagagttaccttcgaccggcggtgatacgctctggaccagcggtattgcggcctatgaggcgctctctgttcccttccgccagctgctgaacgggctgcgtgcggagcatgatttccgtaaatcgttcccggaatacaaataccgcaaaaccgaggaggaacatcaacgctggcgcgaggcggtcgcgaaaaatcctccgttgctacatccggtggtgcgaacgcatcctgtgagcggtaaacaggcgctgtttgtgaatgaaggctttactacgcgaattgtcgatgtcagcgagaaagagagcgaagccttgttaggctttttattcgcccatatcactaaaccggagtttcaggtgcgttggcgctggcaaccgaatgatattgcgatttgggataaccgcgtgactcagcactatgccaatgccgattatctgccacagcggcggattatgcatcgggcgacgatccttggggataaaccgttttatcgggcggggtgatacgagtgcggacggttccctcgcccccttggggagagggttagggtgagggggcgttcaccgtactttcaacaggttaactccccctttctgagaggaaaaaaattaacgcagaatcttcttctcagccaaatccagcgcaaagtagctgaaaatcagatccgcacccgcacgcttaattgaacctaagctttcgagcacgactttctcttcatctatagcacccgccagcgcggcgaacttaatcatcgcgtactcaccgctcacctgatacgcgccaatcggcaattcagtacgttcacgcagctcacgcacgatgtcgaggtacgctccagcaggtttaaccatcaggcagtctgcgccctgggcttcatccagcagtgactcacgaatcgcctcgcgacggttcattgggttcatctgatagcttttgcggtcgccttttaatgcgcttccggcagcttcacggaacgggccataaaaggaagaggcgaacttggtcgaatacgacataatcgccgtatctttaaagcctgcagcgtccagcgcctgacgaatcgcctgtacctggccgtccatcgcggcggaaggggcgatgaagtctgcgcctgcagcagctgcaaccacggcttgcttgcctaaattttccagagtcgcgtcgttgtcgacgccatgctcgcacagcacaccgcagtgaccgtgagaagtgtattcacagaaacaagtgtctgacatgacgatcatttctggcacagtctgcttgcagatgcgcgacatacgcgccaccagtccatcttcccgccaggcgtcgctgccggtttcatcggtatggtgagagatgccaaaagtcattacggaacggataccggcgttggcgatgcgttcaatttcgcgtgccagatgtttctctggaatgcgcatcacgcctggcatggcttcaacggctttgtagtcgtcaatttcttcttcaacaaagatcggcaacaccaggtcgttaaggctaagtgttgtctcttcaaacatagcgcgcagcgcaggagatttgcgcaggcgacgagggcgttggattaagtctgtcatggtctgcctgatgtttgtggaattaaggtgcacagtatacctgaagcggggcaggagtgttttacgaaagttgtcgtgatgttgacaagaagagaatgaaagagagaccaggacatctttgtaatagaaatagcaataatttcatattcactgaaaatatttttaatctttatttatagctcttggttattattttttggcgtttggttgtgctgctataaattgaataattcaaactttgttgtatattgataagatatttatctggtttgtgtttttgatatttataacgcgtatgtatcaaaaataacattatctgcaacatgttgaaatatcgcccttttatcaatttgatgcgtgtttttctccataggttatatatgtccacattcggacttaggggaaagaataattgaaccattcgtctgtaacgcagcataatcattagcgcgaaacataatatgttttctatgcattgataattgatggatcaacttattacgtccctgaggagggatgacaaatgcactcctggaaaaagaaacttgtagtatcacaattagcattggcttgcactctggctatcacctctcaggctaatgcaactacttataatacattcgggtatcacgatgacgcagtcactctattcaattggggcgacaatactaaaactgatcacgactatttgacgtatggtggctatgtatacgaccatgcggctgatggttattttgatactgtatttagtggcgataccgttaatggtgtaatttctacttattatctgaatcacgactatggaacagataccgctaatactctgaatattacgaactcaaatattcacggtatgattacttccgatcagatcggatacggtgattacgtctggaccaacggtagcgattatactggtcatgattgggtagatggcgatattttcactctgaacatcgcgaactcaacaattgacgatgattttgatgcattctacttcaatgatacttatctggatgcagacggtaaaacgtctaaaacagattatgatcgtctggtaacagctgctcttggcaccgctgtaactctggatgttgaaagtaacatcaatatcagcaacaactcccatgttgcaggtattactctggttcaaaacgatttaggtaatgcgacttacaatactgaaggtcatcagtgggacaacaatatcgttgttaataattccactgtaacttcaggttcgctctcagaagacgaacaatcagatcgtggtcattttggcaactctgttgagccaagcgactatggtaatggtgcatcaggtgctgatgatgttgcattagccttcatagatgatgacacttctgattatcgtatggtcaacaacgttacattcaacaattctcagttgcttggcgacgttgtatttgacagtacctggaacgctaactttgacgcgacgggtcacctgattgacaactctaccactgcttacactcatggcggttgggctactgacgatcagaacgtcgatcacctgaacctgactctgaacaacaccaaatgggttggttcagcgaatattgattatgacgttgttgttgctgacgaagccttctacgacgttgcgccaaacagcctgaacccgtacgcttcttactctgaagatggctggaatcgtgttgataacgctaacgcattccatagtggcgtattcgatgttgttctgaacaatggttctgattgggaaaccacgaaagattctctgatcgataccctggctatcaacagcggttctcaggttaacgtgagtgcagattcttccctgacttccgacaccatcactctgaacggtagttcttcaatggaagttaacggtgaagttaacactgatcacctgatcattgataccttctctactgttaacttcggtgaagatactgcttcagcttggacatctgcaccgctgtacgccaacaccattaccgttactaacggtggtgtgctggatgtaaacaccaacatgaatgacatctccagcgtatttgcaactgatactctggaactgaccagtggcaacgttaaagataacaacggtaatgtttacgcaggtgtgtttgacattcatagtaatgactacatcctgaatgcagacctcgtcaacgatcgtaccaacgacaccagcaaatctaactatggttatggtgttattgcgatgaactctgatggtcacttgaccgttaatggtaacaacgacattaataatggcgacgaagttgacaacagctctgttgacaacgttgtagctgcaaccggtaactacaaagttcgtatcgacaactccactggtgctggcgcgattgctgattacgcaggtaagcagctcatctatatcgatgataccaaaaccaacgcgaccttctctgctgctaacaaagctgacctgggtgcatacacctatcaggctgaacagcgcggtaacaccgttgttctgcaacagatggagctgaccgactacgctaacatggcgctgagcatcccttctgcgaacaccaatatctggaacctggaacaagacaccgttggtactcgtctgaccaactctcgtcatggcctggctgataacggcggcgcatgggtaagctacttcggtggtaacttcaacggcgacaacggcaccatcaactatgatcaggatgttaacggcatcatggtcggtgttgataccaaaattgacggtaacaacgctaagtggatcgtcggtgcggctgcaggcttcgctaaaggtgacatgaatgaccgttctggtcaggtagatcaagacagccagactgcctacatctactcttctgctcacttcgcgaacaacgtctttgttgatggtagcttgagctactctcacttcaacaacgacctgtctgcaaccatgagcaacggtacttacgttgacggtagcaccaactccgacgcttggggcttcggcttgaaagccggttacgacttcaaactgggtgatgctggttatgtgactccttacggcagcatttctggtctgttccagtctggtgatgactaccagctgagcaacgacatgaaagttgacggtcagtcttacgacagcatgcgttatgaactgggtgtagatgcaggttataccttcacctacagcgaagaccaggctctgactccgtacttcaaactggcttacgtctacgacgactctaacaacgataacgatgtgaacggtgattccatcgataacggtactgaagggtctgcggtacgtgttggtctgggtactcagttcagcttcaccaagaacttcagcgcctataccgatgctaactacctcggtggtggtgacgtagatcaagattggtccgcgaacgtgggtgttaaatatacctggtaatattcttcactccgaagaaattctggtaatttaatctaaataatgcccgtcaaggatttgacgggcattactgcaaaggacgcgcaaatgttatctgtagttaaacctcttcaggaatttggtaagctcgataaatgtttgtccagatacggtacgcgcttcgagtttaataatgaaaagcaagttatattttccagtgatgtcaataacgaagatactttcgttattttagagggcgttatctctctgcgtagagaagaaaacgtacttatcggtattacccaggctccttatattatggggctggctgatggtttaatgaaaaacgatataccatacaaattaatatcagaaggaaattgtacgggatatcatctaccagccaaacaaaccattacgcttattgaacaaaatcaactctggcgagacgctttttactggttagcctggcaaaatagaattctggaattacgcgacgtgcagctcattgggcataattcctacgaacaaatccgcgcaacattattatcaatgattgactggaatgaagaattgcgatcacgtattggtgtgatgaattatatccatcaacgtacacgcatatcgcgttctgtcgtcgcagaagttctcgctgctttgcgtaaaggcggctatatcgaaatgaataaaggcaaactggtcgctatcaaccgtttgccttcagagtattaatcaggatgcggggataaccaacggtttattcccgcttagctcggtcaccagatcattgatgccatcgctcatatttttaaagcgcgtcaacggcgaacgagtgaccaccacaaacgcgccaatattcttctgcgggatcatcgccatataggtaatgaaaccgccaccaccgcctgtcttctgaataatccccggacgaccctctttcggggccatatatacccagcctaaaccaagcgcatccgctttgccggggacatccatgccaatcactttcgtaaactgcgcgcgcagataaatcaacgtctgcatgcgatctgcttggttactgcgctgataaaaatcagatgacaaatactgctgcatccagcgcatcatatcgccaggcgtggaatagacgccgccgctgccaattgccgccagcgtgttattgcacggactggcaccgcgctcagcaaccattaaacggcggcactgatccggtgagggggtgtaggtggtgtctttcatccccaatggacgggtaatctgctcttcaaacaactgggtataaggcttgccggacgcattcgccagtgcatctgccagcaggtcgaacgcaaggttagagtacgccgcctgactgcctggcgcggcttttagcttcgccgtagaaaggtatttccagcgttgttcgcgcgttggccagacaaacaccggacgatgtgccgcgccaccgggctgttcacggggcagggcgctggtatgggttgccagattcactagggtaatgggcgtcccattgtaggtcggcacgcgtgcgcctggcggagcatatttacttagcggatcgtttaactttacggtcccctggtcgagcaatttcaccagcatttcactggtcattagtttggtgagggaagcaatacgcacgaccgaatccagctgcgggcgaacgttattaccaggtcgcgtttcgccataactacgaaagacgcgctggttaccgtcgataacaaccagcgccatccccgtggcaccgctgccgtaaaaaatatgatcggcataacgatcgacaatatcagaggcaaactccggttcagtgatcggctgcgccgcatggacggaggtcaatgacgccgcacacagcacggcagaaaaaagcagactacgtttcaacggtggtgtccatagattgaatgaaggtaactgagcgtatttatactactcattgatggattgcaaagggcgaattagtgcaataatagtgttaaaaacgtaacggcgcgtaaacacgatctttttcctgctcaccaatgcctgcatttgtgatcctgcgcgtgttaatccgcttatgtaaacaatctttggtttgtgaaatccgtcgaaacaattcttatggtcaggctggcgaactaagcgccttgctatgggtcacaatgggcggtttcatttggctgacgctttgtagcggtcatgcggttaaaacacagcagttgttaaaacgataagaagttagcaggagtgcatatgtttaagtcttttttcccaaagccgggagcgttttttctctcggcctttgtttgggcattgattgccgttatcttctggcaagccggtgggggtgactgggtggcgcgtatcaccggcgcttccgggcagatcccgattagcgccgcgcgtttctggtcgttggatttcctgattttttacgcttactacattgtttgcgtaggactttttgcatttttctggtttatctacagcccgcaccgttggcaatactggtcaatactcggtactgcactgatcatcttcgtcacctggtttttggtggaagtcggggtcgccgtcaacgcctggtatgcaccgttctatgatctgattcaaaccgcgctaagttcgccgcataaagtcactatcgaacaattttaccgcgaagtgggcgtctttctggggattgcgctgatcgctgtggtgatcagtgtgctgaacaacttctttgtcagtcactacgtgttccgctggcgtacggcgatgaacgaatattacatggcgaactggcaacaactgcgtcatatcgaaggggccgcacagcgtgtgcaggaagacaccatgcgttttgcttcaacgctggagaatatgggcgtcagttttatcaacgccatcatgacgttgatcgccttcctgccggtgctggtaacgctctccacgcatgtgccggagctgccgattatcgggcacattccgtatggtctggtgattgccgctatcgtctggtcgctgatggggaccggattgctggcagtggtagggatcaaactgccggggctggagtttaaaaaccagcgagtagaggccgcctaccgtaaagagctggtttatggtgaagacgatgccacgcgtgcgacgccgcctacggtacgcgagctgtttagcgccgtgcggaaaaactatttccgcctctattttcactatatgtatttcaacatcgcccgcattctctatttgcaggtcgataacgttttcggtttgttcttgctgtttccgtcaattgttgccggtacgattacgctcggcctgatgacgcagattaccaacgtttttggtcaggttcgcggtgctttccagtacctgattaactcatggaccacactggttgagttgatgtctatctacaaacgtctgcgcagctttgaacatgaactggatggtgacaaaattcaggaagtaacccataccttgagctaaaaaggagaagtaatgtcgcgcgtcaatcctctatcttcgctgtcattgttggcggttctggttttagcggggtgtagtagtcaggctccgcaaccgttgaaaaagggcgaaaaagcgatagatgtggcgagcgtcgtgcggcagaagatgcctgcgagcgtgaaagaccgcgatgcctgggcgaaagatctcgccaccacctttgaaagtcaggggctggcaccgacgctggaaaacgtctgctcggtgctggcggtggcgcagcaggagtcaaattatcaggcagatccggccgttccgggcttaagcaagatcgcctggcaagagattgaccgtcgtgctgaacggatgcacattcctgcttttctggttcataccgcgctaaaaatcaaatcgccaaacggcaaaagttatagcgaacggttagattcggtgcgtacagaaaagcaattgagcgcgatttttgacgatctgatcagcatggtaccaatggggcagacgctgtttggttcgcttaatccggtgcgcaccggtgggccgatgcaggtcagcattgcttttgccgaacagcataccaaagggtatccgtggaaaatggacggtacagttcgtcaggaagtcttcagtcgccgcggcgggttgtggtttggtacttaccatttactgaattatcccgccagctatagcgcaccgatataccgctttgctgattttaacgctggctggtacgccagccgtaatgccgcgtttcagaacgcagtcagtaaggccagcggcgtgaagctggcactggacggtgatttaattcgttacgacagtaaagaacccgggaaaaccgaactggcaacgcgcaaactggcgggaaaactggggatgagcgacagcgaaattcgccgtcagttagagaaaggtgacagcttctcttttgaggagacggcgctgtacaagaaagtttatcaacttgccgaagcgaaaacgggtaaatcactaccccgcgaaatgttgcctggcattcaactggaaagcccgaaaatcacccgcaacctgactacggcctggtttgcgaagcgcgtagacgaacggcgggcgcgttgtatgaaacagtgatcaaacaggaatgtcatgccagataaggcgttttaggccgtatctggcaacgtaaatcttactggcggcgatgtcgccagtgcagccatagcgccaccactgcaaaaatgaggcagcctactaaaaacgggatcagcccgaaaatggtgccgacacctaaaccaatttccacccgtgggcgacctgtttcctggacctgcattaaacgctcatagacgccgggcgcatgcactaacaggttcagcaattgcgccccagcccaaaagcaaaacagcacaaacaacgcataggcaatgttgccaggcgttgaagaggcattgcgatattttccgctaaacagcgattttgacagggtgaaatcagccataaaaacctccggaagtcatctgcttctcttctggtgtgataccagtggcttatggcaagtctgacaggtcatttagattgtcaatatcagaatcatggtaaattgatgttgggaatattcccgaagcgtgaatcttcgttgtgagtcacaaaatggcaaccttaagttaaatttattaacaattacgaaaatgttgtctacaccacagacggttgttacagaatatgcaaggatgttgtttttcgttaacggagctgccatgaatctgcctgtaaaaatccgccgtgactggcactactatgcgttcgccattggccttatattcattcttaatggcgtggtggggttactgggatttgaagcaaaaggttggcagacctatgccgtcggtctggtgacgtgggtgattagtttctggctggcggggttgattattcgtcgtcgcgatgaagaaactgaaaacgcccaataagaatattatcgggcgttaaaatattacattgtggttttcaatgcgttatccgcagcgtgacgctccagcgccagctcaatcaaacgtgtgatcagatcggtgtaaccgagaccgctggcttgccacagcttcggatacatactgatgttggtgaagccaggcagtgtgttgatctcgttgatcaccacttcgttctctggggttaaaaacacgtctacacgcgccatgcctgcgcatcccaacgtctgataagcctgaacggcaatcgcccggatcttatcgttgatctctggtgcaatggctgccggaactaccactttcgcgccatcttcgtcaatgtacttggtgtcgtaggcatagaaatcgctggtgagtacgatctcgccacaggtgctggcttgcggattgtcgttgcccagaactgcgcattcgatctcacgacctttgatcccttgctcaacgatcactttatgatcgaactcgaacgccagatcgacggcaattgcgtactgttcttcactggttactttgctgacaccaacagaagagccctgattagccggttttacaaacagtggtaaccccagtttagactccacttcggcaaaactgatgttgtgacgattagcgcgcgtcagggtaataaatggcgcaatgttcagcccggcatcgcgtagcagacgtttggtgacatctttatccatacaggctgctgaagccagaacatcagaacctacaaacggtaaattggcgacccgcagcattccctgcaaggaaccatcttcgcccagcgtaccgtggacaatcgggaaaatgacatccaccgtcggcaacggctgaccgttttgcgcgtcgataagctgatgctcatgtttacctggcacctgcgcaaggctggtcgccgaagggcgcaacgcaatatgggcaggatcgtctgcatttagcagataattgctggcatcgctgacgtgccattgcccttgtttatcaatgcccagcagcacaacgtcgaagcgacttttatcaatggcatcgacaatgttttttgccgattgcagagacacttcatgttccgctgatttaccaccaaaaacgattcctacccgcagtttttccatcttaaaaacctatcccgtctaacacaaagtgcatacattaccacgacaaaacgggggattcgcggccttctgaaagattgttgcaatcttctgctgacgaagcgtgcaacgtactggtgaagaaagtgcgttatctcaaagatgtgcgcaagatcacaaaaatgatgaacgggaagctaatttattcctggcttaaatggccatgcggtgagtttttttctcttaattataagttaacgaagagaatatatttcataacttttatttataataaaggttgataattaaaagcctatattttgtgtgggtaattatttaaataagagaaacgtttcgctggtaatcaaacaaaaaatatttgcgcaaagtatttcctttgtcataaaaataatacttccagacactatgaagttgtgaaacataatgttaacttctccatactttggataaggaaatacagacatgaaaaatctcattgctgagttgttatttaagcttgcccaaaaagaagaagagtcgaaagaactgtgtgcgcaggtagaagctttggagattatcgtcactgcaatgcttcgcaatatggcgcaaaatgaccaacagcggttgattgatcaggtagagggggcgctgtacgaggtaaagcccgatgccagcattcctgacgacgatacggagctgctgcgcgattacgtaaagaagttattgaagcatcctcgtcagtaaaaagttaatcttttcaacagctgtcataaagttgtcacggccgagacttatagtcgctttgtttttattttttaatgtatttgtacatggagaaaataaagtgaaacaaagcactattgcactggcactcttaccgttactgtttacccctgtgacaaaagcccggacaccagaaatgcctgttctggaaaaccgggctgctcagggcgatattactgcacccggcggtgctcgccgcttaacgggtgatcagaccgccgctctgcgtgattctcttagcgataaacctgcaaaaaatattattttgctgattggcgatgggatgggggattcggaaattactgccgcacgtaattatgccgaaggtgcgggcggcttttttaaaggtatcgatgccttaccgcttaccgggcaa

SEQ ID NO: 114 - DNA, 272332 bp, Escherichia coli
  modified_base (95877)..(95877): a, c, t, g, unknown or other
tgctgatatttaccacgcaattcacctatttacaggtaatgactcaytattgatagtgttttatgttcagataatgcccgatgactttgtcatgcagctccaccgattttgagaacgacagcgacttccgtcccagccgtgccaggtgctgcctcagattcaggttatgccgctcaattcgctgcgtatatcgcttgctgattacgtgcagctttcccttcaggcgggattcatacagcggccagccatccgtcatccatatcaccacgtcaaagggtgacagcaggctcataagacgccccagcgtcgccatagtgcgttcaccgaatacgtgcgcaacaaccgtcttccgaagcctgtcatacgcgtaaaacagccagcgctggcgcgatttagccccgacatagccccactgttcgtccatttccgcgcagacgatgacgtcactgcccggctgtatgcgcgaggttaccgactgcggcctgagttttttaagtgacgtaaaatcgtgttgaggccaacgcccataatgcgggcagttgcccggcatccaacgccattcatggccatatcaatgattttctggtgcgtaccgggttgagaagcggtgtaagtgaactgcagttgccatgttttacggcagtgagagcagagatagcgctgatgtccggcggtgcttttgccgttacgcaccaccccgtcagtagctgaacaggagggacagctgatagaaacagaagccactggagcacctcaaaaacaccatcatacactaaatcagtaagttggcagcatcaccctcgatgcattaccgcttaccgggcaatacactcactatgcgctgaataaaaaaaccggcaaaccggactacgtcaccgactcggctgcatcagcaaccgcctggtcaaccggtgtcaaaacctataacggcgcgctgggcgtcgatattcacgaaaaagatcacccaacgattctggaaatggcaaaagccgcaggtctggcgaccggtaacgtttctaccgcagagttgcaggatgccacgcccgctgcgctggtggcgcatgtgacctcgcgcaaatgctacggtccgagcgcgaccagtgaaaaatgtccgggtaacgctctggaaaaaggcggaaaaggatcgattaccgaacagctgcttaacgctcgtgccgacgttacgcttggcggtggcgcaaaaacctttgctgaaacggcaaccgccggtgaatggcagggaaaaacgctgcgtgaacaggcacaggcgcgtggttatcagttggtcagcgatgctgcctcactgaattcggtgacggaagcgaatcagcaaaaacctctgcttggactgtttgctgacggcaatatgccagtgcgctggctaggaccgaaagcaacgtaccacggcaatatcgataagcccgcagtcacctgtacgcctaatccgcaacgtaatgacagtgtaccaaccctggcgcagatgaccgacaaagccattgaattgttgagtaaaaatgagaaaggatttttcctgcaagttgaaggtgcgtcaatcgataaacaggatcacgctgcgaatccttgtgggcaaattggcgagacggtcgatctcgatgaagccgtacaacgggcgctggaattcgctaaaaaggatggcaacacgctggtcatagtcaccgctgatcacgcccacgccagccagattgtcgcgccggataccaaagctccgggcctcacccaggcgctaaataccaaagatggcgcagtgatggtgatgagctacgggaactccgaagaggattcacaagaacataccggcagtcagttgcgtattgcggcgtatggcccgcatgccgccaatgtcgttggactgaccgaccagaccgatctcttctacaccatgaaagccgccctggggctgaaataaaaccgcgcccggcagtgaattttcgctgccgggtggtttttttgctgttagcaaccagacttaatggcaaatcacgggcgcatacgctcatggttaaaacatgaagagggatggtgctatgaaaattacattactggttaccttgcttttcggtctggtttttttaaccaccgtcggcgctgccgagagaacgttaaccccacaacaacagcgtatgacctcctgtaatcagcaggcgacggcgcaggcgttgaaaggggatgctcgtaagacctacatgagtgattgcctgaagaacagcaagtctgcgcctggtgaaaaaagtttgacgccacagcagcaaaagatgcgcgaatgtaataatcaagcaacgcaacaatctctgaaaggtgatgatcgtaataagtttatgagtgcctgcctcaagaaagccgcctgatacctgatagtgctaacgggtgagctacgaaagtggctcacccgaaatttcatacttctgcctttagccccgtctctataatttgggaaaattgtttctgaatgttcccaaaaataatgaatgatgaaaactttttcaaaaaagcggcggcgcatggggaggaacctcctttaactcctcaaaacgaacatcagcggtccgggctgcgcttcgcccgtcgcgtcagactaccccgtgcggttggcctggctggcatgttcttaccgattgcttcaacgctggtttcgcacccgccgccgggctggtggtggctggtgttggtcggctgggcgttcgtctggccgcatttagcctggcagatagcgagcagggccgtcgatccgcttagccgggaaatttacaacttaaaaaccgatgcagtattagcgggaatgtgggtaggcgtaatgggcgtaaacgtgctgccttccaccgctatgttgatgattatgtgtctgaatttgatgggggcaggcggcccccgtctgtttgtcgcgggtctggtgttgatggtggtttcctgccttgtcaccctcgagcttacgggcattaccgtgtcgttcaatagtgcgccgctggaatggtggctctcccttcccattattgtcgtttatcctctgctgtttggctgggtcagctaccagacggcaaccaaactggcggaacataaacgcaggttgcaggtcatgagtacccgcgacggcatgacgggcgtgtataaccgacgtcattgggaaactatgttacgcaatgaatttgataactgtcggcggcataatcgcgatgcaacgttactgattatcgatatcgaccatttcaagagcatcaacgatacctggggtcatgatgtgggcgatgaagcgattgtggcgcttacccgacagttacaaattaccctgcgcggtagcgatgtgattggtcggtttggcggcgatgagtttgcagtaatcatgtccggtacgccagctgagagcgccattaccgccatgttacgggtgcgtgaagggctaaacacgttacgcttgccgaatacgccacaggtaactttacggattagtgtgggggttgcgccgctgaacccacaaatgagtcactatcgtgagtggttgaaatcggcagatttggcgctttacaaagcaaagaaagccggacgtaaccgcaccgaagtggcggcctgacgtccggcgaaagtcatcaggatttgctgagtttttctgatttttccatacacttcgtcatcgcttcgatcactgcggcacggaagcctttctcttccagtacgcgtaccgcttcaatggtggtgcctcccggtgagcagaccatatctttcagtgcccccggatgttctcccgtttccagcaccatttttgcggaacccattaccgcctgagcggcaaatttatacgcctgggcgcgtggcatcccgcccagcacggcggcgtcggccatcgcttcgataaacataaatacgtaggctggcgaagaaccgctcacaccgaccaccgggtggatcatcggctcagcaattacttccgcttcgccaaagcagcggaaaatattcagcacatcagcggtatcttctggggttaccagcgcgtttggcgttacggaggtcatcccggcattaaccagcgcgggagtgttcggcatggcgcggataattttccggtcatggcccagcgcgcgggcaagctggtcgagcgtgacacctgcagcaatagaaacgaccagagagtctttattcaggctggaggtgatttcgctaagcactttaatcatgatgccaggtttaacggcagcaaaaatgatgtcggcgatttgcgccacttcttgcgccgattctgcggcgttgatgccgaactggtcatgcagggcggcgactttatccggggagggggtgtatacccagatttgccctggaagcacctgaccgctggcaatcagaccgccgagaatggcttttcccatattgccgcagccaataaaaccgattttcttttccattgcctcactcctgccgtgaaattcattgttttgataatcgctggcagaagcataaacagaactatgccggaaggcaaaagcgcgacacaatagaggattacccaacaaaggatgactttatgacaatttgggtggatgccgacgcgtgtcccaatgtaattaaagagattttgtatcgcgcggcggaacgtatgcagatgccgctggtactggtagcaaaccagagtttacgcgtgccgccatcgcgatttattcgtacgctgcgcgtcgcggcaggtttcgacgttgccgataacgaaattgtccggcagtgtgaagcgggcgatttggtgatcaccgcagatatacctttggctgctgaagccatcgagaaaggcgcagcggcgcttaatccgcgcggcgaacgttacacgccagcgaccattcgtgagcgcctgacgatgcgcgattttatggataccttacgtgccagtgggatccagaccggcggaccagatagcctttcacaacgtgaccgccaggcctttgccgcggagctggagaagtggtggctggaagtgcaacgtagtcgtggctaaatgtaatttattatttacacttcattcttgaatatttattggtatagtaagggatgtattgagattttcactttaagtggaattttttctttacaatcgaaattgtactagtttgatggtatgatcgctattctcatgacaccggctttcgccgcattgcgacctattggggaaaacccacgatgacacaacctctttttctgatcgggcctcggggctgtggtaaaacaacggtcggaatggcccttgccgattcgcttaaccgtcggtttgtcgataccgatcagtggttgcaatcacagctcaatatgacggtcgcggagatcgtcgaaagggaagagtgggcgggatttcgcgccagagaaacggcggcgctggaagcggtaactgcgccatccaccgttatcgctacaggcggcggcattattctgacggaatttaatcgtcactttatgcaaaataacgggatcgtggtttatttgtgtgcgccagtatcagtcctggttaaccgactgcaagctgcaccggaagaagatttacggccaaccttaacgggaaaaccgctgagcgaagaagttcaggaagtgctggaagaacgcgatgcgctatatcgcgaagttgcgcatattatcatcgacgcaacaaacgaacccagccaggtgatttctgaaattcgtagcgccctggcacagacgatcaattgttgattttagagcgcctatacttaacgttcatcccgtgaaataaggaagaacgatgccaacgaaaccgccttatcctcgtgaagcatatatagtgacgattgaaaaaggaaagccaggacagacggtaacctggtaccaactcagagccgatcatcctaaaccagactcgttgatcagtgaacatccgacggctcaggaagcgatggatgcgaaaaaacgctatgaggaccctgacaaagagtgaccgcatcagactgctcggaagggattctgagtgccactacaagggatctgcgtcacatttttcataattcatgtttttctaataattagaatattaaacaataacaatccattactggaatcatttggaatctttacattatgccgtgcacgtctgctgctacgctttttgtcatttgtagcacaagtaagtgtcagcagtggtgcttcacacttgcccggtaattaacgacgaaagaaaagtaaggtggatgaacaatgagtgcgtcgttggcgatcctgaccatcggcattgtacctatgcaggaggttttgccgctcctgacggaatacattgacgaagataatatttcccatcatagcctgctggggaagttaagtcgtgaagaagtgatggcggagtacgcgccagaagcaggcgaagacaccattctcacattattaaatgacaaccagctggcccatgtttcgcgtcgtaaagtggagcgagacctgcaaggtgtggttgaagtgctcgataatcagggttatgacgtcattttattaatgagtacagcaaacattagtagtatgactgcgcgtaatacgatctttcttgagccgtcgcgaatattgcctccactggtttcctctattgttgaagatcatcaggtgggggttatcgttccggttgaggagatgctgcccgttcaggcgcaaaaatggcaaattttgcagaaatcgccggtattttcattgggtaaccccattcatgattcagaacaaaaaatcattgatgccgggaaagaattactggcaaaaggggctgatgtcatcatgctggattgtttaggatttcaccaacgtcatcgcgatttactgcaaaaacagctcgatgttcctgtcttgctgtctaacgtattgattgcacggctggctgcggaattactggtgtaattttgcgtgacagtcagcgcctctggcccctatagtgaagtagatgttcaactaccaaacagggccagtttatgcttcaaagtaatgagtacttttccggcaaagtgaaatcaatcggcttttccagcagcagcactggtcgcgccagcgtgggtgttatggttgaaggcgaatacaccttcagcaccgctgagccggaagagatgacggtaatcagtggcgcgctgaatgtgttactgcctgacgcgaccgactggcaagtgtatgaagccggttcggtgtttaatgttcccggtcacagtgagtttcatctgcaagttgccgaacccacctcttatctgtgccgctatctgtaattcctcgccttccccttgaacgggagggcatttttctgaaatatcctctctttaacccataataatatttcctttgcttcgattttttcaatttccgatatattcataattcatcaaggttgatataaatatcagtgaagatctccaggtattttttgcggaactgatgacacaacgccccctggagcaagttacagcgggagatctatgaattactgacgccaacgatcaacctgcaaattcactgtacccgttatcccatgcgcagccaaaatggtggaagcaccgatttaccgcgttattggatcacgttggataaaaacgtgatctgggattacccgaaagactttattgcaggtaacggtggagtgcgtaattttcacggtgaaacttgctggtatccttacctgacggatatttgttcaatttctgatttattgcgtgaatatattgacaccccaaaagcggagttgttaacaaaacaatttaccagcgataaatgggggttagtgaatattctgcgtgctgctgacaggcgaatagggatgaggcgattagatcagttacggcgtaaaacgcataatattgctgcgctaaaaattattgcccgccgtagcgaataattatatgcctggtgtggcatcgtacgccggataagacgcggcaggcgtcgcatccggcattaaaggaaaatcagcaattaacgttgtgcttcgccacctaatccttcaatcaggttttgaattaacgctgccagttcaccagtcatcaggatgaaatcggcatcaaaacgctgggcgaaatcttcacggtcgatatcttcgttttgatcgcgcagctcgtcgcagaacttcagacgcttgagcgaaccatcgtcgcacatcacaaactgaatgcgctgctgccagtcgagcgccagtttagtcaccacttttccggcttcgatgtgattggtgatctcttcgctggtcagatcttgtttcttcgcacggatcacgccgccatcttccagcaacgatttcagctcggcttcatcaagcaactggaagccctgtgctgcgctaccggagcgaacccattcggttagcgtcagttcaatcgggttttccatgctcaatggtacaacaggtaacgaccccaggcttttacgcagtaatgccagcgtatcttccgcttttttggcgctggcgcagtccaccataatcaaaccattaaccgtgtcgatccacatcattgtctggctaaaacggctgaaagctcgcggcagcagagagtgcagcacttcgtctttcagcgaatctttttcggttttcttcagcttacgcgcctgttccgcttccagtttggcgattttcgcttccagcgcctgtttaatcaccggagacgggaggattttttcttctttgcgtgcgcagataacaatttgaccattggcaacgtgcgttaacgcatcgctgtgcgatcccatcggaggaacccagcccatcttcgccatgtcctggctgccacatggggtaaatgccatcgaggctagctgtttttccatctcttctgcacgcagcgaaatctcgcggctaagacggtaaaccattaaatttttgaaccacagcatgataatttccacggccttgtcgttaaatttagcgggcatgataacgaattgtcggcggccttgcattgccaatccggttgtccgtctctacgctattgatattgaaaaaaataaggagagtaccgtgcgtataggtatcgatttaggcggcaccaaaactgaagtgattgcactgggcgatgcaggggagcagttgtaccgccatcgtctgcccacgccgcgtgatgattaccggcagactattgaaacgatcgccacgttggtttatatggcggagcaggcgacagggcagcgcggaacggtaggtatgggcattcctggctcaatttcgccctacaccggcgtggtgaaaaatgccaattcaacctggctcaacggtcagccattcgataaagacttaagcgcgcggttgcagcgggaagtgcggctggcaaatgacgccaactgtctggccgtttcagaagcagtagatggcgcggcagcgggagcacagacggtatttgccgtgattatcggcacgggatgcggcgcgggcgtggcattcaatgggcgggcgcatatcggcggcaatggcacggcaggcgagtggggacacaatccgctaccttggatggacgaagacgaactgcgttatcgcgaggaagtcccttgttattgcggtaaacaaggttgtattgaaacctttatttcgggcacgggatttgccacagattatcgtcgtttgagcggacatgcgctgaaaggcagtgaaattatcagcctggttgaagaaagcgatccggtagcggaactggcattgcgtcgctacgagctgcggctggcaaaatcgctggcacatgtcgtgaatattctcgatccggatgtaattgtcctggggggcgggatgagcaatgtagaccgtttatatcaaacggttgggcagttgattaaacaatttgtcttcggcggcgaatgtgaaacgccggtgcgtaaggcgaagcacggtgattccagcggcgtacgcggcgctgcgtggttatggccacaagagtaaaaaaaccaggcaattggcgcatcatgcctgatgcgacgcttgccgcgtcttatcaggcctacaaaatgtgccagaaccgcgtagggcggataaggcgttcacgccgcatccggcaataagcaacgcgcaccgtgacagtaatctaccccagtggtttcgccagcaccggactatccgccgcttgctggcgcttatagcgaccatacagcagcaacgatgacatcgcagcaaacgaaagcagggcggcaggcagcgccacgtaattatatgccagccccagcgtcagcatcataccaccgcaatatgcgccgacggcgctaccgaggttaaacgctatttgcccacctgcggcacctaataactctccgcctttggcattttgcagtaacaatatttgcagaggtgctgaaagggcaaataatcccgcgcaacaaataaaagcaaaaataagcgacgttgttttcatgccgccgcagaaaaagagcatcagcagtgccagtacaattataaagtcagtcactgctgcaatgcgcagtggtgaataacgtcctgaaatcctgccacttagcatatttcccaacaccatccctagcccaactaacatcataataaaggtcatcgccgtttccgaaaaaccggaaataaacatcatgtatggctttacgtagctgaaccaggcaaacacacctgcgttgccaaacatcgtggcggcgaaaattaaccacggggccgggctgcgtaaaaagtgaaattgttcgcgcagctttcctttcgcctcgtcgcgaatatccggcacccaaaaatagaccgatgccatcaccgcaatattaaaaacagcgatcaataaaaaggtgtaacgccagctaaattcctgacttaaatacgttcccagcggaatgcccagcaaattggcgactgtcatcccggaaaccatccccgccacggcggcggtgacttttccgggtttgataatttttgataacacgatcgcgccgacgccaaaaaatgcgccatgcggaaagccggaaaccaggcgaccaatggcaagcatcaggtaagacgaagagagcgtgaacatggcgttgccaatgacgcacaacgccaccagaaacaacaagatatgtttgagtgagtagcggctggaaaagagtgcgatgattggcgcaccgaccaccactcccagcgcataatacgagatcatatgcccggcagcaggaatcgaaattcctacgttatgcgccagctccgtgagcacgcccataatgccaaattcggccatccccaaaccaaacgtgcccagagccaaagataaaatgactttttcataccaccatcacaactaccagaacggctaccaatcaccgtagccaataaagtgatagcttgcaggataacgaccagcaaggccaagagataattcgcccctctgtattcattatcctgctgaatagttatttcactgcaaacgtactttccagtttgctgtagcctaggccgttgatctttttcactttgatctgcaccggaatacgctctttcatcgcttctacgtggctaatcacaccgatggttttgccactggcgttcagggcatccagcgcatcaagggcggtatccagcgtttcgctatccagcgtgccaaaaccttcatcaaggaacagcgagtcaatacgtgttttatggctgaccagatccgaaagcgccagcgccagcgccagactaacgaggaaactttcgccgccggaaagggtacgggtatcgcgtaccgcatctgcctgccaggtatcaacaacctcgacttccagcgcctcgctggctttgcgctgtaacagatagcgcccgtgcagccgggtaagttgctgattagcgagatggactaaattatccagcgtcagcccctgggcaaacttgcggaatttatcgccctctttggaacctattagcgaattcagatatccccagtcctcaacctgctgcgtcatttgagcaatttgctgcattaaggtttgttgttgctgacggttatctgcatcctgcttcagctgctggcgaatctcgccttgactcgtggtgttttcacgcaacttttggtgagtttgcgctaactcttgctgaatctgctccaccgtcacagtgagagccaacccgtcaggtcggtgttgttgatgctgtgccagcgtttctgctgtctgagtgaccagcgtttgcgcctgacggcgctggttttccagattctgcttgagctgttccagctgcgttagtgtttgttcatccattagcgccgcaaggaacgcctgctgatcgtcaaagacgctggcctgtagcgcggtgtcaaactgcgcctgggctttttgcagactttgcgccgccagaacatcctgttgctgtaacgtctgctgctggctgtgtaatgcgagacattgttcatgaacctgccgccagttatccagcgccacagtttcttcgctgtgcgggagatcatcactttgcggcaacgtttccagaatcggcgtcagctgctgaatacggttttgcagcgcggttaattcgttctggcgttgctgccagctctgcgcttcttgctgacgtgtcgccaaccagctctcttcttcatcttcctgtggcaatgtcagtgcataacccgccaatgccgttaagagctgctgctggcgttgttcaatttgctgttgatactggataatttgctgattatgcgcggcaatctgcccttgtaattcatgtcgttggctgagtaaccgcagctggcgttcgtgctcatcttgtgcatccagccacggttgaatatcgtcctgtggctgcaaggtgatattgaggctggccgtgacggcttgccattgttgagtaagtgcttgctcatcttgtcggaggctttgcgcttcgttttcatcgcgctgaagctgctttgttaaggcgtccagttgcccgcgcagcgccgcaccttcttcgccgagctttttaacttcgttttccagcgccagtaatcgagactgattaacaccaggctccagcgcctgatacgcctcgaccgccgggtggctggtggaaccacaaagtggacaaggctgacccgcctgtaactgtgcacgttgagcttccagcgttttgatgcgcgcttcctgctcgcaaatggttttcacatcggcaagttgctgcgtcttttctttataacgctggcgcatttcgttaagtgcggcgttacgttgcgtctgttcttgcgtgacattctggatagcgacctgtaactgcgccagacgtttttgttggggaacaatctgtccatgtagcgcgaccaggtgctgacgcagtgggcgttgctcagcatgttgcgccagggcggtagcaacttcatcggcggttaacgtcaacgtgatcgccgcaagcgcattaagtttttgctcagcatgggttaactgttgctgccattgccgcagatgctcgcgatcgctggtttgttgggagaactgcgcacgccaacccgccagttcgttgttccactgacggaagcggtcgtgttcctgtaaccaggtattcaggctttgttgctgctgctgtaattctgctgactgcttcgccgcgtggtggcgaatgctcgcgcgaagcgccattgtgctctgtaagcgagtatttacttcttcaatctgctggcgagtatgcgccagcgccgcgctgtgttctgcgatgcgttcccagtgcggacgaagatttcgtgccggttgtgccagactgagcgccgccagttgaggttgcgctttttcttcttcggctaacgcctgttgcaaggcctgctgacggcggctggcttcttgctgcaattcgtccagacgcgttaaccagtttagtgattgttgttcttgctgctgcgcggtaagtaactgtttttcttcgtcagtaagtacctgcaaactcgctgtcagcgattgcacttgttccggcgtgagcaacgcgacgccgctggcctgcgcttgcagcttctccagctcagtgcgggccgatttgtgctgctcaaaaaccatcgccgagatttgcccgtagatttcagtgccggttaactcctcgagcaattccgcgcgttctttgggtttggcattcaggaaggcagcaaattgcccctgcgaaagcagcatcgaacgggtgaagcgcccgtaatccagcccggttaacgtcgctgtcagttccagcttatctttcactttgtcggcgagaattttgccgtcggcgcagcgcgccagctctacgcgtggcacctgcaaattaccgtcgggttggttacgcgcccgattctggctccagaatgcacggtacgcttcacctttcacttcaaactccacctccgccagacattcggcggtatcgcgggtcatgagatcattttgcgattgtgaaacgttagagagacgcggagtttcgtgatacagcgccagacaaatggcgtccagcagggtggttttccccgcacctgttgggccggtaatagcaaacagcccgttgctggcgaacggctcgcgggtgaaatcaatcttccattcgccttttaatgagttcaggtttttcaggcgcaggctgagaattttcatgcttcgtgttctccggcgagggtatgcaacgtcgtggtgaaaagatgctgcagacgttgctgctgcgattcatccagttcttccagtgccagacggcgattgaacacctcttcgacgctgagttcgctgagggtttcacgctgttggctggctaacacacgctcgcgctgttcacgactccggcgtaccagcaatacttcaacaggcaatgattcggttaatgcctggattttgcgctgaatatcatgcagatactcatcagtagtgatttcgatatccagccagacaggcggctcctgtgatacatcgcgccactgttccagctgtgcggtaatcgacgccagatcgcctttcagcaccgccatgggttgcgttaccggtacgttcaggttttccacgctctctaatttgccgtttgaaaatgtcaccagatggacatatttactctttccgcattcatcaaaactcagtggaatgggagagccgcaatagcgaacatgttccatgccgccaataatctgtgcgcggtgaatatgcccgagcgcgatgtagtcggctggtggaaagttttgtgctggaaacgcgtccagcgtgccaatataaatgtcacgcacggcgtcacttttactggcacccacggtcgttaagtgtcccgtggcgatgatgggcagaggctgatcgccgcgcagtttgcaggcatcggcatattgttgttggtaataatcggtaatcgctgccagtaaatgctgctgtttttcaataccgttaagccccgcctggctggtaataatgtcacgcggacgtaaaaacggaatggggcacagcactgcgcctggcgtcccgtcgcgacgaggcaagatttgcggcgcatgtccggcgctggcgaccacggtcgtattgaggaacgccatgatatcgcgcgattcattcagcgtggcgaccgagtcatggtttcctgccagtaccaccagatgacagccagtttgctgtaaattgacaacaaaacggttgtataacgtgcgggcgtaactgggcggcgagccggtatcgaaaacatcaccagcaacaataatcgcatccacctgatgggtttgtgctgtttccagcagccagtcaagaaaagcctgatgttcagcttcgcggcttttactgtagaagttctggccgagatgccagtctgaggtgtgaaggatgcgcataacgattccctggcgaaaaagcatgggcgcgattatacccaaacagatgtgccatttgcttttttctgcgccacggaaatcaataacctgaagatatgtgcgacgagcttttcataaatctgtcataaatctgacgcataatgacgtcgcattaatgatcgcaacctatttattacaacagggcaaatcatggcgagacgtattctggtcgtagaagatgaagctccaattcgcgaaatggtctgcttcgtgctcgaacaaaatggctttcagccggtcgaagcggaagattatgacagtgctgtgaatcaactgaatgaaccctggccggatttaattctccttgactggatgttacctggcggctccggtatccagttcatcaaacacctcaagcgcgagtcgatgacccgggatattccagtggtgatgttgaccgccagaggggaagaagaagatcgcgtgcgcggccttgaaaccggcgcggatgactatatcaccaagccgttttcgccgaaggagctggtggcgcgaatcaaagcggtaatgcgccgtatttcgccaatggcggtggaagaggtgattgagatgcagggattaagtctcgacccgacatctcaccgagtgatggcgggcgaagagccgctggagatggggccgacagaatttaaactgctgcacttttttatgacgcatcctgagcgcgtgtacagccgcgagcagctgttaaaccacgtctggggaactaacgtgtatgtggaagaccgcacggtcgatgtccacattcgtcgcctgcgtaaagcactggagcccggcgggcatgaccgcatggtgcagaccgtgcgcggtacaggatatcgtttttcaacccgcttttaacgccttgctcatcggacgcagagcagggcttatgatttcttaactggagtatcttacgtgctggaacggctgtcgtggaaaaggctggtgctggagctgctactttgctgcctcccggctttcatcctgggtgcattttttggttacctgccctggtttttgctggcatcggtaacaggactgcttatctggcatttctggaatttattgcgcctttcatggtggctgtgggtggatcgcagtatgaccccgccaccggggcgtggtagctgggaaccgctactatacggcttacaccagatgcagctgcgaaataaaaaacgccgccgtgaactgggcaatctgattaaacgctttcgtagcggcgcggagtcgctgcccgacgcagtggtgctgaccactgaagagggcggtattttctggtgtaacggtctggcgcaacaaattcttggtttgcgctggccggaagataacgggcagaacatccttaacctgctgcgttacccggagtttacgcaatatctgaaaacgcgtgatttttctcgcccgctcaatctggtgctcaacaccgggcggcatctggaaattcgcgtcatgccttatacccacaaacagttgctgatggtggcgcgtgatgtcacgcaaatgcatcaactggaaggggcgcggcgtaacttttttgccaacgtgagccatgagttacgtacgccattgaccgtgttacagggttacctggagatgatggatgagcagccgctggaaggcgcggtacgcgaaaaagcgttgcacaccatgcgcgagcagacccagcggatggaagggctggtgaagcagttgctgacgctgtcgaaaatagaagccgcaccgacgcatttgctcaatgaaaaggttgatgtgccgatgatgctgcgcgttgttgagcgtgaggctcagactctgagtcagaaaaaacagacatttacctttgagatagataacggcctcaaagtgtctggcaacgaagatcagctacgcagtgcgatttcgaacctggtctataacgccgtgaatcatactccagaaggcacgcatatcaccgtacgctggcagcgagtgccgcacggtgccgaatttagcgttgaagataacggaccgggcattgcaccggagcatattccgcgcctgaccgagcgtttttatcgcgttgataaagcgcgttcccggcaaaccggcggtagcggattagggttagcgatcgtgaaacatgcggtgaatcatcacgaaagtcgcctgaatattgagagtacagtaggaaaaggaacacgtttcagttttgttatcccggaacgtttaattgccaaaaacagcgattaatccgcctttgtcatcttttattgccataagccagtcgatgctggcttattttctttgcagtcaaaatacgggcgttagattttacaacggttggtgattttttgttcgcatgattagccatgtctttttcacggaaatagtgttttatactggttggtgatttcttatcgctatatacccctggtttttagatccctccttgctttaaaacgttataagcgtttaaattgcgcttcaggtgctgtcatactgactgcattaacgcggtaaatcgaaaaactattcttcgccgcgcctggttgggagtatttcccgctaaaattgtttaaatataccgctgtatcatccccagggattggcacaaaaatttaacgttacaacaccacatccacaggcagtatgatttatgacccatcaattaagatcgcgcgatatcatcgctctgggctttatgacatttgcgttgttcgtcggcgcaggtaacattattttccctccaatggtcggcttgcaggcaggcgaacacgtctggactgcggcattcggcttcctcattactgccgttggtctgccggtactaacggtagtggcgctggcaaaagttggcggcggtgttgacagcctcagcacgccaatcggtaaagccgctggcgtactgctggcaacggtttgttacctggcggtggggccgcttttcgctacgccgcgtacagctaccgtttcctttgaagtggggattgcgccgctgactggtgattccgcgctgccgctgtttatctacagcctggtctatttcgctatcgttattctggtttcgctctatccgggcaagctgctggataccgtgggcaacttccttgcgccgctgaaaattatcgcgctggtcatcctgtctgttgccgcgattgtctggccggcgggttctatcagcacggcgactgaggcttatcaaaacgctgcgttttctaacggcttcgttaacggctatctgaccatggatacgctgggcgcaatggtgtttggtatcgttattgttaacgcggcgcgttctcgtggcgttaccgaagcgcgtctgctgacccgttataccgtctgggctggcctgatggcgggtgttggtctgactctgctgtacctggcgctgttccgtctgggttcagacagcgcgtcgctggtcgatcagtctgcaaacggcgctgctattctgcatgcttacgttcagcacacctttggcggcggcggtagcttcctgctggcggcgttaatcttcatcgcctgcctggtaacggcagttggcctgacctgtgcttgtgcagaattctttgcccagtacgtaccgctctcttatcgtacgctggtgtttatcctcggcggcttctcgatggtggtttctaacctcggcttaagccagctgatccagatctccgtaccggtgctgaccgctatttatccgccgtgtatcgcactggttgtattaagttttacacgctcatggtggcataattcgtcccgcgtgattgctccgccgatgtttatcagcctgctttttggtattctcgacgggatcaaagcatctgcattcagcgatatcttaccgtcctgggcgcagcgtttaccgctggccgaacaaggtctggcgtggttaatgccaacagtggtgatggtggttctggccattatctgggatcgcgcggcaggtcgtcaggtgacctccagcgctcactaaatcactgaacatttgttttaaccacggggctgcgatgccccgtggttttttattgtgttgatgggttaggaattgatggaaagtaagaacaagctaaagcgtgggctaagtacccgccacatacgctttatggcactgggttcagcaattggcaccgggctgttttacggttcggcagacgccatcaaaatggccggtccgagcgtgttgttggcctatattatcggtggtatcgcggcgtatatcattatgcgtgcgctgggggaaatgtcggtacataacccggcagccagctctttctcgcgttatgcgcaggaaaacctcggcccgctggcaggttacattaccggctggacctattgctttgaaatccttattgtcgccatcgccgatgtgaccgcttttggtatctatatgggtgtctggttcccgacggtgccgcactggatttgggtactgagcgtggtgctgatcatttgcgccgtaaacctgatgagcgtgaaggtcttcggtgagctggaattctggttctcgttctttaaagtcgccaccatcatcatcatgattgtcgccggtttcggcatcatcatctgggggattggcaacggcgggcaaccgaccggtattcataacctgtggagcaacggcggcttcttcagtaacggctggcttggcatggtaatgtcgttgcaaatggtgatgtttgcttacggtgggatcgaaattatcgggattaccgccggtgaagcgaaagatcctgagaaatcgataccgcgtgcgattaactccgtgccgatgcgtattctggtgttctacgtcggtacgctgttcgtcattatgtctatctacccgtggaatcaggttggcactgccggtagcccgttcgtgctgacgttccagcatatgggcattacctttgccgccagcattcttaactttgttgtgctgactgcttcgctgtcggcaattaacagtgatgtatttggcgtaggccgtatgctccacggtatggcagagcagggcagcgcgccgaaaattttcagcaaaacgtcgcgtcgcggtattccgtgggttacggtgctggtgatgactaccgcgctgctgtttgcggtgtatctgaactacatcatgccggaaaacgtcttcctggtgatcgcttcgctggcaaccttcgccacggtgtgggtgtggattatgatcctgctgtcgcaaattgccttccgtcgccgtttgccgccagaagaagttaaggcgctgaaatttaaagtgccgggtggggtagcaacgaccatcggcgggctgattttcctgctctttattatcgggttgattggttatcacccggatacgcgtatctcgctgtatgtcggtttcgcgtggattgttgtgctgttgattggctggatgtttaaacgccgccacgatcgtcagctggctgaaaaccaataatacttgcgttctgtaagccggttcaggaggaaatcctgatccggctattccgaaagttatccgcccccgtcctcctcccccaaatatccttcagatgatgagtgatcctgcattaggctatggcaaggtgatcagattttcatcacaggggaattatgatgttaaatgcatggcacctgccggtgcccccatttgttaaacaaagcaaagatcaactgctcattacactgtggctgacgggcgaagacccaccgcagcgcattatgctgcgtacagaacacgataacgaagaaatgtcagtatcgatgcataagcagcgcagtcagcagcagcctggcgtcaccgcatggcgtgcggcgattgatctctccagcggacaaccccggcggcgttacagtttcaaactgctgtggcacgatcgccagcgttggtttacaccgcagggcttcagccgaatgccgccggcacgactggagcagtttgccgtcgatgtaccggatatcggcccacaatgggctgcggatcagattttttatcagatcttccctgatcgttttgcgcgtagtcttcctcgtgaagctgaacaggatcatgtctattaccatcatgcagccggacaagagatcatcttgcgtgactgggatgaaccggtcacggcgcaggcgggcggatcaacgttctatggcggcgatctggacgggataagcgaaaaactgccgtatctgaaaaagcttggcgtgacggcgctgtatctcaatccggtgtttaaagctcccagcgtacataaatacgataccgaggattatcgccatgtcgatccgcagtttggcggtgatggggcgttgctgcgtttgcgacacaatacgcagcagctgggaatgcggctggtgctggacggcgtgtttaaccacagtggcgattcccatgcctggtttgacaggcacaatcgtggcacggggggagcttgtcacaaccctgaatcgccctggcgcgactggtactcgtttagtgatgatggcacggcgctcgactggcttggctatgccagcttgccgaagctggattatcagtcggaaagtctggtgaatgaaatttatcgcggggaagacagtattgtccgccattggctgaaagcgccgtggagtatggacggctggcggctggatgtggtgcatatgctgggggaggcgggtggggcacgcaataatatgcagcacgttgctgggatcaccgaagcggcgaaagaaacccagccggaagcgtatattgtcggcgaacattttggcgatgcacggcaatggttacaggccgatgtggaagatgccgccatgaactatcgtggcttcacattcccgttgtggggatttcttgccaataccgatatctcttacgatccgcagcaaattgatgcccaaacctgtatggcctggatggataattaccgcgcagggctttctcatcaacaacaattacgtatgtttaatcagctcgacagccacgatactgcgcgatttaaaacgctgctcggtcgggatattgcgcgcctgccgctggcggtggtctggctgttcacctggcctggtgtaccgtgcatttattacggtgatgaagtaggactggatggcaaaaacgatccgttttgccgtaaaccgttcccttggcaggtggaaaagcaagatacggcgttattcgcgctgtaccagcgaatgattgcgctgcgtaagaaaagtcaggcgctacgtcatggcggctgtcaggtgctgtatgcggaagataacgtggtggtatttgtccgcgtgctgaatcagcagcgtgtactggtggcaatcaaccgtggcgaagcttgtgaagtcgtgctacccgcgtcaccgttgctcaatgccgtgcaatggcaatgcaaagaagggcatgggcaactgactgacgggattctggctttgcctgccatttcggctacggtatggatgaactaacgttttataacgccttgtgtgacgcctgcgccatcatccgcggataaaactgccagaagcgggtttcgagggcgtcataatgagcgtctaaatcgtaccaggagtcacgcagggcatccagacgtgggcggcggcttgccatgccgtttaacacgttctggatgaaatccatatcgcgatagcgcaccagccactgctctgaccacaagtaattgttcagattgataaaacgtggcggtgagtccggcaaaatcgtcatcacttgctcgcgggcataacagacaaattcctgtagcggaaagtccggcgacagctgcgaccagtggcgggaaagaaagtgatcccacatgacatccagcgtaataggcgcaacgcggcgagtttcactacgaaaccattcccgtgcttcgcggacttccggcagattgtcggttaatacgtcgatacgtcgatgcatatgaatgccagccacgacgtcgggcggaaaactttcttcaggatttccgcgtacgaaatcagccagtaaattgccggaaagcgagctttccgcgagatgggctaaatgcaggtgagctaaaaaattcatcgattatattctatccaaaagggggtaaaggttgcagggagagcgccccggcactagactacccgcctcttattttagtctgagtcagtgtcatgcgcgttaccgatttctcctttgaattgcccgaatccctgattgcccactatcccatgcctgaacgcagtagctgtcgtttactgtcgctggacgggccgacgggcgcgctgacgcacggtactttcaccgatttacttgataagctcaaccccggcgatcttctggtttttaataatacccgcgtgatcccggcgcgcctgtttgggcgtaaagccagcggcggcaagattgaagtgctggttgagcggatgctcgacgacaaacgcattcttgcgcatattcgcgcctcgaaagcgccaaaacctggcgcagaactgctgctgggcgatgacgaaagtattaacgcaacaatgaccgcgcgccacggcgcactgtttgaagtcgaattcaatgatgatcgttcggtactggatatcctcaacagtatcggccatatgccgctgccgccgtatatcgaccgtccggacgaagacgctgaccgcgaactttatcaaaccgtttatagcgaaaaaccgggcgcggttgcagccccgaccgctggtctgcattttgacgagcctttgctggaaaaattgcgcgccaaaggcgtggagatggcgtttgtgacgttgcacgttggtgcgggcaccttccagccggtgcgcgtcgacaccattgaagatcacatcatgcactcggaatacgctgaagtaccgcaggatgtggtagacgcggtactggcggcgaaagcgcgcggtaaccgggtgattgcggttggcaccacttcagtacgttcgctggaaagcgcggctcaggcagcgaaaaacgatctcattgaaccgttcttcgacgatacccaaatctttatctatccgggcttccagtacaaagtggtcgatgcgctggtgacgaacttccacttgccagagtcgacgctgattatgctggtttcggcctttgccggttatcaacacaccatgaacgcctataaagcagcggtagaagagaaatatcgcttttttagttacggtgatgcgatgtttatcacgtacaatccgcaggcaattaatgagcgcgtcggggagtaattccgcggcgctggtttaaaacgttggactgtttttctgacgtagtggagaaaaaatgaaatttgaactggacaccaccgacggtcgcgcacgccgtggccgcctggtctttgatcgtggcgtagtggaaacgccttgttttatgcctgttggcacctacggcaccgtaaaagggatgacgccggaagaagttgaagccactggcgcgcaaattatcctcggcaacacctttcacctgtggctgcgcccgggccaggaaatcatgaaactgcacggcgatctgcacgattttatgcagtggaaggggccgatcctcaccgactccggcggtttccaggtcttcagccttggcgatattcgtaaaatcaccgaacagggcgtgcacttccgtaacccgatcaacggcgatccgattttcctcgatcctgaaaaatcaatggagattcagtacgatcttggttcggatatcgtcatgatctttgatgagtgtacgccgtatcctgctgactgggattacgcaaaacgctccatggagatgtctctgcgttgggcgaagcgtagccgtgagcgttttgacagtctcggaaacaaaaatgcgctgtttggtatcattcagggcagcgtttacgaagatttacgtgatatttctgttaaaggtctggtagatatcggttttgatggctacgctgtcggcggtctggctgtgggtgagccgaaagcagatatgcaccgcattctggagcatgtatgcccgcaaattccggcagacaaaccgcgttacctgatgggcgttggtaaaccagaagacctggttgaaggcgtacgtcgtggtatcgatatgtttgactgcgtaatgccaacccgcaacgcccgaaatggtcatttgttcgtgaccgatggcgtggtgaaaatccgcaatgcgaagtataagagcgatactggcccactcgatcctgagtgtgattgctacacctgtcgcaattattcacgcgcttacttgcatcatcttgaccgttgcaacgaaatattaggcgcgcgactcaacaccattcataaccttcgttactaccagcgtttgatggcgggtttacgcaaggctattgaagagggtaaattagagagcttcgtaactgatttttaccagcgtcaggggcgagaagtaccacctttgaacgttgattaatattaataatgagggaaatttaatgagcttttttatttctgatgcggtagcggcaacgggtgcaccggcgcaaggtagcccgatgtctttgattttgatgctggtggtattcggtctgattttctatttcatgatcctgcgtccacagcagaagcgcaccaaagaacacaaaaagctgatggactccattgccaaaggtgatgaagttctgacgaacggtggcctggttggtcgcgtaaccaaagtagcggaaaacggctacattgctatcgcgctgaatgacaccactgaagtagttattaaacgtgacttcgtagctgccgtcctgccgaaaggcaccatgaaggcgctgtaattaaaatttttccctaagggaattgccgtgttaaaccgttatcctttgtggaagtacgtcatgctgatcgtggtgattgtcatcggtctgctgtatgcgcttcccaacctgtttggtgaggatccggctgttcagatcactggtgcgcgcggagtcgccgccagtgagcaaacgctgatccaggtccagaaaacgttacaagaagaaaaaataactgctaagtctgtggcactggaagagggcgctattcttgcgcgcttcgactccactgacacccagctgcgcgctcgtgaagcattaatgggcgttatgggtgacaaatacgtcgtggcgcttaaccttgccccggcaacgccgcgctggctggcagctattcacgctgagccgatgaagctcggccttgacctgcgtggcggcgttcacttcctgatggaagtggatatggacaccgcgcttggcaaactccaggaacaaaatatcgatagcctgcgcagcgatctgcgtgaaaagggcatcccgtataccaccgttcgtaaagaaaacaactacggcctgagcattactttccgcgatgctaaagctcgtgatgaagccattgcgtatctgagcaagcgccatccggacctggtgattagtagccagggcagcaaccagctgcgtgcggtaatgagcgatgctcgtctgagtgaagcgcgtgaatatgcggtgcagcagaacatcaatatcctgcgtaaccgtgtaaaccaacttggcgtggcggagccggtggttcagcgtcagggtgctgaccgtatcgttgttgaactgccaggtattcaggacactgcgcgtgcgaaagagattctgggtgcgacggcaacgctggaattccgtctggtaaacaccaacgttgaccaggccgctgcggcatccggtcgcgtaccgggcgactctgaagtgaaacagacccgcgaaggtcagccagttgtgctgtacaaacgcgtaattctgaccggtgaccatatcaccgactccacttccagccaggacgaatacaaccaaccgcaggttaacatctcgctcgatagcgctggtggtaacatcatgtctaacttcactaaggacaacatcggcaaaccgatggcaaccctgtttgtggagtacaaagacagcggtaagaaagatgcaaatggtcgtgcggttctggtgaaacaggaagaggtgattaacatcgccaacatccagtctcgtctgggtaacagcttccgtatcaccggcatcaacaacccgaacgaagcccgtcagctgtcactgctgctgcgtgccggtgcgttgatcgcgccgattcagattgttgaagaacgtaccattggcccaaccctgggtatgcagaacattgaacaggggctggaggcttgccttgccggtctgctggtttctattctgttcatgatcatcttctataagaagtttggtctgattgcgaccagtgctctgattgccaacttgatcttaatcgtcggcattatgtcgctgttgccaggcgcaacgctgagtatgccaggtatcgcgggtatcgtcttaacccttgcggtggcggtcgatgcgaacgtactgatcaacgaacgtattaaagaagagttgagcaacggacgtactgttcaacaggcaattgatgaaggttatcgtggcgcattcagttctatcttcgatgcgaacatcaccacgctgattaaagtcatcatcctgtacgcagtgggtaccggggcaattaaagggttcgcgattactaccggtatcggtgtggcgacgtcgatgtttaccgcgattgtcggtacgcgtgccatcgtaaacctgctatatggcggcaagcgcgtcaagaagctgtcaatctgaggagtgcgatgtggcacaggaatatactgttgaacaactaaaccacggccgtaaagtctatgactttatgcgctgggactactgggctttcggcatctctggtctgctgttaatcgccgctatcgttattatgggcgtgcgcggctttaactgggggctggatttcaccggtggtacggttatcgaaattacgctcgaaaaaccggctgaaattgacgtaatgcgtgatgcattgcaaaaagccggttttgaagagccaatgctgcaaaactttggtagcagccacgacatcatggtccgtatgccgcctgctgaaggcgaaaccggcggtcaggtgctgggcagccaggttctgaaggtgattaacgaatccaccaatcagaatgcagcagtgaagcgtattgagttcgtcggtccgagcgtgggggcagaccttgcgcaaaccggtgcgatggcgttgatggcggcgctgctgtctatccttgtgtacgtaggttttcgctttgagtggcgactggcggcaggggtcgttattgcgctggcgcacgacgttatcattacgctgggtattttgtcgttattccatatcgagattgacctgaccattgtggcatcgttgatgtcggttatcggttactcgcttaacgacagtatcgtggtatcggaccgtattcgtgaaaacttccgcaagatccgtcgcggtacgccttacgaaatctttaacgtgtccttgacccagacgctgcaccgtaccttgatcacatccggtactaccttgatggttatcctgatgctgtacctcttcggtggtccggtactggaaggcttctcgctgaccatgcttatcggtgtttccatcggtactgcatcttccatctatgtggcatctgcgttggctctgaaactgggtatgaagcgcgaacacatgttgcagcagaaagtggaaaaagaaggggcggatcagccgtcaattctgccgtaatcaagttcccgttgatgttgaaaatcccggtcagaagatcgggattttttttgatgtatggagattgctaaaatccccgcatcttgggaaactgcgcgtaaccctacatttcatccaggtaactcttcatggctatcatcccaaaaaactatgcgcggttagaaagcggctatcgcgaaaaagcattaaaaatatatccgtgggtctgcggtcgctgttcccgcgagtttgtttattccaacctgcgtgaacttactgttcaccacattgatcacgaccataccaataacccggaagatggcagtaactgggaattgctttgtctctattgccacgatcatgagcattcgaaatataccgaagcggatcagtatggtacgaccgttatcgcaggggaagatgcgcagaaagatgtcggtgaagcgaagtacaacccattcgctgacctgaaagcgatgatgaacaagaagaagtgattaaaacgtaaaattgcctgatgcgctacgcttatcaggactacgttatttcagcaatatattgaatttacgtgcttttgtgggtcggacaaagcgtttacgccgcatccggcatgaacaaagcgcacgttgttaacaatctgaaatgccgggaataaatcccggcattttcataatcagaagttgtaacctactaccaggtaaccaccccagccggtagagcgaacgttgaagttgccgttgccgaagttcagttctgcatcgtcgttccactgaccaccgtcgtgccagtaacgagctacgacagagtagtgccagtgatcgtagttcagagccagaatatggctggaagcgatagagttattagtacgggtcttaataccgttgattgcgttaccgctgtcatcccctaaatcggaaccccagtcgaagttggtgaagccgatgtagctcagctgaccgccccacagatcggtaatcggcacaaagtatttaattttgaaacggtaaccgtcccactcgttttcgttcgctgcgccatagttctgccactggtatttcgcatagacgttcatggacaggctcatcggcagaccagtatcgatgtcggtacccagacccatgtaccaggtgctctggcgaccatctttattacgacccatgtcgtaaatgtagttgttcgcgaagtaccactctttgaacggaccgaagctaaggtcagtattggtcagcttgtcgatggagaaacgtggttcgatttccataaacagcggagaaccgtggttccagatacctttagcatcggagttaccgccgaagaataccggcgcatccgcataaccatagaagtcgaaccagtcttttttagcgaatgcttcgtactcaaggtaggtatcgttgcggatctgcggtccgaaacgggtgtgatagcttccgacaacgttaacgctctggtgccaccagtcggaaagatactgcggtttgtcgttttcagctgcgttgacagtaaaagacgaagagagcgccagtaccgcaccggctgccagtaatgtttttttcatatgtatgccactgtttgaaaatcccttgcgggagtgaaaaaggcgcaaattgcgtttctaaatatttcgtatacagaggagcctattataaaaatcattgctcacaaaaatatgtttcgtttcacagttctatcatttacgtaatcgattgcgttcacgtttacacacattcgggcagggattgtactgactttcacccttgttgcaaacttttactatcaatcagggtgatgtaagcggagtaacaaaatgacggggaaagatgttgcgagacgcacaaaatcgccccgaaatacgtttactgcataacaggttgaatatcgtggatacgtacgaagtctaactgttctacagaaataccctttaactgtaacggaatatcaacatcgctgggggcgaggacgctggcaggggcattaatcaattgattctgcacattgatttcctgaaagttgtctattgttccctgaatttgcccatattcaacagttccgctgaatgcgggcaagggatcattcgactcgccctgaatacgtagcgtcagggtggtgccatctgcatcaggcgtaatattcaccagcgacatacgtaaagtaccgatctggctttccagtcttgccggtgttttcgctcctggcagaaggtaaaccccactgctggattttgcattcagcctgttttgctgagtgattttgaccgtttctttattgagttgcgtcatctcctagttcagcgtgctgacgctgtgtttcatctgtcgcacttcgctctgctgcacacaggcgctaaggctgaacaggcttcccagcaggagcagtcgaaaaacgttagtattcataggtcgtccctttctcgtcgcaattagcctaatggtagagggtaaaagcagcgaaagcatcgatcctttatctcaaaagcgttgcgcctttgttgtatcgtcagttcagggtaaaatagatttctgttaaccacctggtcaggacgccgtatgcattgcccattctgtttcgccgtggacactaaggtaattgactctcgtctcgtgggcgagggttcatccgtacgccgccgtcggcagtgtctggtgtgtaatgaacgtttcaccacctttgaagtggcggagctggttatgccgcgtgttgtaaaaagcaacgacgtgcgtgaaccgtttaatgaagagaaattgcgtagcggaatgctgcgggcgctggaaaaacgtccggtgagttccgatgacgtcgaaatggcaatcaatcatattaaatcgcagctgcgcgccaccggtgagcgcgaagtgccgagcaagatgattggcaatctggtgatggagcaattgaaaaagctcgataaagtcgcctatatccgttttgcctctgtctaccgcagtttcgaagatatcaaagaatttggcgaagagatcgcgcgcctggaggactaagccgtgcaggacgagtattacatggcgcgggcgctaaagctggcgcaacgaggacgttttaccacccaccccaacccgaatgtcgggtgcgtcattgtcaaagatggcgaaattgtcggtgaaggttaccaccaacgagcgggtgaaccacatgccgaagtacacgcgttgcgtatggcgggtgaaaaagccaaaggcgcaacggcgtatgtgacactcgaaccctgtagccatcatggtcgtacgccaccgtgctgtgacgcactcatcgccgctggcgtagcgcgcgtggttgcctcgatgcaagatcctaacccgcaggtcgctgggcgtggactttaccgtctgcaacaggctggcattgacgtcagccacggctgatgatgagtgaagccgagcaattgaataaaggctttctcaagcggatgcgcaccggctttccttatattcagttaaaacttggcgcatcgcttgatggccgcacggcgatggcgagcggcgaaagccagtggatcacttcgcctcaggcgcggcgcgacgtacaacgacagcgcgcacaaagtcatgccattttaaccagcagcgccacggtgctggcggatgatccagccttaacagtgcgttggtctgaactggatgaacaaactcaggcgctctacccgcaacaaaatctccgccagccagtacgtattgtgattgatagccaaaatcgcgtgatgccggaacatcgcattgtgcagcagcccggcgaaacctggttcgcgcgtacgcaggaagattctagtgagtggccggaaacggtgcgtaccttgctgattccagagcataaaggtcatctggatctggttgtactgatgatgcaactgggtaaacagcaaattaacagcatctgggtggaagcggggccaacgctcgctggcgcattgctgcaggcgggtttagtcgatgagctgattgtctatatcgcacctaaactattaggcagcgacgcccgcggattatgcacgctgccagggcttgagaaattagccgacgccccccaatttaaattcaaagagatacgtcatgtaggcccggatgtttgcctgcatttagtgggtgcatgatctcccggctcgaaagggaagcagcgcacgaaatattatgctaaaatccgcccccctgcggggccatactcgaacccgaaggaagaaaatgaacattattgaagctaacgttgctaccccggacgctcgcgtcgccatcaccatcgcgcgtttcaacaactttatcaatgacagcctgctggaaggtgcaattgacgcactgaaacgtatcggtcaggtaaaagatgaaaacattaccgttgtttgggtgcctggtgcctatgagctgccgctggcggcgggtgcactggctaaaaccggtaaatacgacgcggtgattgcgctgggtacggttattcgtggtggcactgcccactttgaatatgtcgctggtggtgcaagcaacggcctggcgcatgttgcccaggacagcgaaattccggttgcttttggggttctgaccactgaaagcattgaacaagcgatcgaacgtgctggcaccaaagctggcaacaaaggtgcagaagctgcactgaccgcgcttgaaatgattaatgtattgaaagccatcaaggcctgaaattagtaaggggaaatccgtgaaacctgctgctcgtcgccgcgctcgtgagtgtgccgtccaggcgctctactcctggcagttgtcccagaacgacatcgctgatgttgaataccagttcctggctgaacaggatgtaaaagacgttgacgtcctgtacttccgtgagctgctggccggggtggcgactaataccgcatacctcgacggactgatgaagccatacctgtcccgcctgctggaagaactgggacaggtagaaaaagcagtactgcgcattgcgctgtacgaactgtctaaacgtagcgatgtgccatacaaagtggccattaacgaagcgatcgaactggcgaaatcgttcggcgcagaagacagccataagttcgtcaacggcgtactcgataaagcagcacctgtgattcgccctaacaaaaagtgatatccaggccggtagattcacggaagaccgttccatgatcgccggccttttcttttttacctgctgaggcataacgtatggcatgtggcgagttctccctgattgcccgttattttgaccgtgtaagaagttctcgtcttgatgtcgaactgggcatcggcgacgattgcgcacttctcaatatccccgagaaacagaccctggcgatcagcactgatacgctggtggcgggtaaccatttcctccctgatatcgatcctgctgatctggcttataaagcactggcggtgaacctaagcgatctggcagcgatgggggccgatccggcctggctgacgctggcattaaccttaccggacgtagacgaagcgtggcttgagtccttcagcgacagtttgtttgatcttctcaattattacgatatgcaactcattggcggcgatactacgcgtgggccattatcaatgacgttgggtatccacggctttgttccgatgggacgagccttaacgcgctctggggcgaaaccgggtgactggatctatgtgaccggtacaccgggcgatagcgccgccgggctggcgattttgcaaaaccgtttgcaggttgccgatgctaaagatgctgactacttgatcaaacgtcatctccgtccatcgccgcgtattttacaggggcaggcactgcgcgatctggcaaattcagctatcgatctctctgacggtctgatttccgatctcgggcatatcgtgaaagccagcgactgcggcgcacgtattgacctggcattgctgccgttttctgatgcgctttctcgccatgttgaaccggaacaggcgctgcgctgggcgctctctggcggtgaagattacgagttgtgtttcacggtgccggaactgaaccgtggcgcgctggatgttgctctcggacaccttggcgtaccgtttacctgtatcgggcaaatgaccgctgatatcgaagggctttgttttattcgtgacggcgaacctgtcacgtttgactggaaaggatatgaccattttgccacgccataaagatgtcgcgaaaagtcgcctgaagatgagtaatccgtggcatctgcttgctgtcggattcggaagtggattaagcccgatcgttcctgggacgatgggctcgctggcagcgattccgttctggtatctgatgacctttttgccctggcagctctactcgctggtggtgatgctggggatctgtatcggcgtctatctttgtcatcagaccgcaaaagatatgggcgtgcacgatcacggcagcattgtctgggacgaatttattggtatgtggatcacgctcatggcgctgccgaccaatgactggcagtgggttgccgccgggtttgtgattttccgtattctggatatgtggaagccgtggccgatccgctggtttgatcgcaatgtacatggcggcatggggatcatgatcgacgatattgtcgccggggtgatctccgcaggtatcctgtactttatcggtcatcactggccgctgggtattctgtcgtagttgtgcaccagtgccttatgtgacgcttgtcacgtctcatcaggcctggactcttatttaaatcctacgaccgcatgcggtttatacggcgtttccagttcggcaatctgttctggcttcaaagtgatatccaccgcgttcagcagctcatcaagctgttcttcccgcgatgtaccgataatcggtgcggcaatgcccggtttactcaacaaccaggccagcgcaacttgtgctcgtgttgcaccgagttcttcactgacgcccgttaaccgctctgcgatctgcgcgtcattttcatcgctttctttatagagatttttccccacctcatcagacaccagtcgtgcggtagtttctccccacggacgcgtcagtcgcccccgcgccagcgggctccacggaatcaccgccacgccctcctgataacacagtggcagcatctcgcgctcttcttcgcgataaatcagattgtagtgatcctgcatactgacaaactgcgcccagccgtgctgtttttggagttccagtgcctgagcaaactgcgaagcgtgcattgatgacgcgccgatataacgcgctttcccggcttttaccacgtcgttcagagcttccagcgtctcttcgatcggcgtgttgtaatcccagcgatgaatttgcaggatatcgacataatccatgccgagacgtcgcaggctgtcgtcgatagagcgcaaaaatttgtgcacgggataatccttccggtaaatcaccaacgcgatggaacactttcgtcgcaacgaccacgtcttcacgacgggcgaaatcccgcagtgcgcgaccaacgatctcttcgctgctgccatcggaatagctattggcggtatcaaagaaatttatgccgccttccagtgcacgtttaattatgggacggctgctttcttccggcagtgtccatgcgtgattaccgcgatctggctcgccaaaggtcatacagccgaggcaaagtcgggaaacgcgaaggtcggtttttcctaaggggttgtattgcatgctgccactcctgccatgaataatttcttaagcatagcaggagtggagtagggattatgccagccaggccttgattttggcttccataccggcggcaccgaggccgagttcggcgcgcatttcttcctgagttccttgtggaataaagaagtcaggcaggccaatgttcagcacgggtactggtttacgatgggccattagcacttcgttcacgccgctgcctgcgccgcccataatggcgttttcttctacggtgaccagcgcttcatggctggcggccatttccagaattaacgcttcatcaagcggtttcacaaaacgcatatcgaccagcgtagcgttcagcgattcagcgactttcgccgcgtctggcatcagcgtaccaaagttaaggatcgccagtttctcgccacgacgcttcacaatgcctttgccaattggcagtttttccagcggcgtcagttccacgccaaccgcgttaccgcgcgggtagcgcaccgcggacgggccgtcgttatagtgatagccggtatagagcatctggcgacattcgttttcatcgctcggggtcataatgaccatttccggtatgcagcgcaggtaagagaggtcaaaagcgccctgatgggtttgaccgtcagcaccaacaatgcccgcgcggtcgatggcgaacaggaccgggagcttttgaatcgccacgtcatgcagcacctgatcataggcgcgttgcaggaaagtggagtaaatcgcgacaatgggtttgtacccaccaatcgccagaccggcggcaaaggtcaccgcgtgttgctcggcgattgccacgtcgaagtaacgatccgggaatttacgtgaaaactcgaccatgccggaaccttcacgcatcgccggagtaatcgccatcagcttgttgtctttcgctgccgtttcgcacaaccagtcgccaaagatttttgaatagctcggcaaaccgccgctacttttcggcaaacaaccgctggagggatcaaatttaggcacggcgtggaaagtgatggggtctttttctgccggttcataaccacgaccttttttggtcatgatatgcaggaactgcgggcctttcaggtcgcgcatgttcttcagcgtggtgataagccccagcacatcgtgaccgtcaaccgggccgatgtagttaaagcccagctcttcaaacaacgtgccaggcactaccatgcctttaatatgttcttcggtacgtttgagcagctctttaattggcggaacgccagagaaaacttttttcccgccttcgcgcagtgaagagtaaagcttaccggaaagcagctgcgccagatggttgttgagcgcgccgacattttcggaaatcgacatttcgttgtcgttgaggaccaccagcatatcaggacggatatcgcccgcgtgattcatcgcttcaaacgccatgcctgcggtaatcgcgccatcgccgattacacagacggtacggcgatttttgccttctttctcggcagcaaccgcaataccaattccggcactgatggaggttgatgaatgcccgacgcttaatacgtcatattcgctttcgccgcgccacgggaacgggtgcaggccgcctttctgacggatggtgccgattttgtcgcggcgtccggtcaaaattttatgcggataagcctgatgccccacatcccaaatcaattggtcaaacggggtgttgtagacatagtgcagcgccacggtcagttcgaccgtgcccagcccggaggcgaagtgcccgctggaacggctcacgctgtcgagtaaatagcggcgcagttcgtcgcagagtttcggtaaactctctttcggcaacagtcgtaactcctgggtggagtcgaccagtgccagggtcgggtatttggcaatatcaaaactcatcaggggcctattaatacttattgtttatttattacgctggatgatgtagtccgctagcgcttccagtgccgaggtatcgagtgattgttcagccagttgtttcagcgactgacgggcatcgtcgatcagatcccgggctttcttccgggcttgctcaagacccagaagtgcagggtaggtacttttaccaagttgctggtcggcaccctggcgttttcccaacgttgcagtatctcctaccacatccaggatgtcatcctgaacctggaaggcaaggccgatgctctctgcgtacttgtcgagtactggcagagcacgacgccctttatctccggcgcttaatgcaccaaggcgaacggcggcgcgaatcaatgcgccggttttatgacgatgaatacgctcaagcgcgtccagaggtacgtgtttgccttccgcgtctaaatctaatgcctgaccaccgcacattccggcaataccgctggcgctcgccagttcagaaatcatcgaaattctgtcgcgatccgacacttccggcatattggcatcgcttagaatcgagaacgccagcgtttgtaaagcgtcgccagcgagaatcgcgtttgcttcgccaaacttcacatggcaggtcggcaaaccgcgacgcagatcgtcatcatccatcgccggtaaatcatcatgaattaatgagtaagcgtggatacactctacggcggcagcgggtgcgtccagcgtgtttgtgctaacgccaaacatatgaccggtggcataaaccaggaagggtcgcagacgcttaccacctaataatgcgccatactgcatggtttcgaccacgggagtgttctgaaagggcagtggggcgataaaacggctcagcgcctggttggcctgcttaacgcaggcttcgagttgctgcggaaagtccattactcattgtccggtgtaaaaggggttagagaggcgtcttcattgtcagacagcagaatttgtacgcgctgttcggcttgttgtaatttggcctgcccctgacgtgccagctgcacgccgcgttcgaactcgttcagcgcctcttccagcggcaggtcgccactttccagacgggttacaatctgttccagctcgctcagcgccttttcaaagctggcgggagcctcatttttcttcggcataatgaatgtctgactctcaatatttttcgccccgtcatggtaacggactcagggcaaatagcaaataacgcgcaatggtaaggtgatgtgcgcagcaaagcgatgttagtggtatacttccgcgcctggatgcagccgcaggtgtgggctgctgtatttttccctatacaagtcgcttaaggcttgccaacgaaccattgccgccatgaagtttatcattaaattgttcccggaaatcaccatcaaaagccaatctgtgcgcttgcgctttataaaaatccttaccgggaacattcgtaacgttttaaagcactatgatgagacgctcgctgtcgtccgccactgggataacatcgaagttcgcgcaaaagatgaaaaccagcgtctggctattcgcgacgccctgacccgtattccgggtatccaccatattctcgaagtcgaagacgtgccgtttaccgacatgcacgatatttttgagaaagcgttggttcagtatcgcgatcagctggaaggcaaaaccttctgcgtacgcgtgaagcgccgtggcaaacatgattttagctcgattgatgtggaacgttacgtcggcggcggtttaaatcagcatattgagtccgcgcgcgtgaagctgaccaatccggaagtgactgtccatctggaagtggaagacgatcgtctcctgctgattaaaggccgctacgaaggtattggcggtttcccgatcggcacccaggaagatgtgctgtcgctcatttccggtggtttcgactccggtgtttccagttatatgttgatgcgtcgcggctgccgcgtgcattactgtttctttaaccttggcggcgcggcgcatgaaattggcgtgcgtcaggtggcgcattatctgtggaaccgttttggcagctcccaccgcgtgcgttttgtcgctattaatttcgaaccggtcgtcggggaaattctcgagaaaatcgacgacggtcagatgggcgttatcctcaaacgtatgatggtgcgtgccgcgtctaaagtggctgaacgttacggcgtacaggcgctggtcaccggcgaagcgctcggccaggtgtccagtcagacgctgaccaacctgcgcctgattgataacgtctccgatacgctgatcctgcgtccgctgatttcttacgacaaagagcacatcatcaacctggctcgccagattggcaccgaagactttgctcgcacgatgccggaatattgcggtgttatctccaaaagcccgacggtgaaagcggttaagtcgaagattgaagcggaagaagagaaattcgacttcagcattctcgataaagtggttgaagaagcgaataacgttgatatccgcgaaatcgcccagcagaccgagcaggaagtggtggaagtggaaaccgtcaatggcttcggcccgaacgacgtgatcctcgatatccgttctatcgatgaacaggaagataagccactgaaagtcgaagggattgatgtagtttctctgccgttctataaactgagcaccaagtttggcgatctcgaccagaacagaacctggctactgtggtgtgagcgcggggtgatgagccgtctgcaggcgctctatctgcgcgagcagggctttaacaatgtgaaggtatatcgcccgtaatttgtggttgtaacgtcgcatctggtcagatgcgacgcttaccgcatccgacactactcgtaataattataaatccctgccgccatcaccagttgtgatgccacttcatgggctttctcgcgcccaaccagcaggtcgataattttcagaccaaagtcgatagctgtccccggcccctggctggtcagcaattttacccgtgcatcccagacgacgcgcttgtcctgccattgttcagcgggaattttgtctttcagcgtcgggaagccggtcatattaccaatcgggaagatatcgtgcggcaccagcacggtggctggcgcggcgcaaatagccgcgacgatacgcccggaacggtggaactgtttaacggtttcaaccagcagggtactatcgcgaaaacactctgcgcctttaatgccaccaggcagtacgatcacgtcatattcgccatcagccacctcgaccagcggcgcatccgccagcagcttcacgccgcgcgagcaggtaatggccaggttgccatcgctggcgacgctggcagtggtgactttgataccgccgcgaaccagcagatcgatagtggtgacggcttcagtctcttcactaccaggggcgaggcaaaccagtgccgatgcgctcatattcactctcctttctttttaccatttcaaacaggcgggtgttttccggtacggcaatcccatgcgcgcgggcgcggcgtaagagaaaaccattgatatagtcgatttcggtgtggcgcagcgcgcggatatcctgcaacatcgacgagatattttccgctgtggcatcaatcacctgcatcacgtaatcacgcaaatcttctgctgaagtatgatgcccttcgcgctcgatcactgccgcgacttcttcgcatatctgcataatttcttgcggatgatgacgtaattcaccattcgggcaattccagatggcggtcagtggattaatcacacagttgacggccagcttgcgccacagctcggcgcgaatattgttatgccaggcaacgtcaggcaacacggtttgcaaaatatccgccagataactgtaatcgccatcctgttgccgtgccggaccaatatgcgtgattccgtttgccacatgaataatgacattgccgtcgcggcgggcggcatgggtggtggtgcccatcagtaatggctgctgaatgttttgcaactcttcgatggtgcccatgccgttgtgaattaacagtattggcgtggttacaggcagtgtggacgcgaggcttttgacggcatcgtaaacctgccatgctttcagcgtcaccaggagcagatcgctggtggcaagaaaatcgggatcgttggcggtcagcgattcgttaaatatcgaaccatctgtctcaaccagattcacgctacaataaggttgcggtacgcgcagccagccctgaacttcatgaccctgtttgcaaagtgctgtaagccataattgccctaaggcaccgcatcccaatacggtaattttcattgttcctcctcacccgcaaccactccgggtgttcaataaggctatcccttaattgtgcatgctgttgcgactatgcacaattaagggatacgtcctggtgcaggactgtcggttatttaactttgcgggtattatgcttcgcatcaaaaatgaagggagaggaaaagatgccatctttcgatattgtctctgaagttgatcttcaggaagcacgtaacgcggtcgataacgcgagccgcgaagtggagtcccgttttgacttccgtaacgttgaagcctcatttgagctgaacgacgccagcaaaaccatcaaagtgttgagcgagtccgatttccaggtcaatcagttgctggatattctgcgtgccaagctgctgaagcgcggcattgaaggcagttcgctggatgtaccggagaatatcgttcatagcggtaaaacctggtttgtggaagcgaaactgaaacagggcattgagagcgcgacccagaagaaaatcgtcaagatgatcaaagacagcaaactgaaagtgcaggcgcaaattcagggcgatgaaatccgcgtaacgggcaaatctcgtgatgatttgcaggctgtcatggcgatggtacgtggtggcgatctcggtcagccgttccagttcaaaaacttccgcgattaatcgcgactatgtgcgttttgttcatgtcagatgcggcatgaacgcctgattcggcctacaaaggtttgtaattcagaaactttgtaggcctgataagcgtagcgcagcaggcaattcgccgcgttttttatgcctgacgaattgcctgttctatctcaaagcgattcgtcactttgctgtcgattttcacataagctgaatgttcttcttctgcaatcaacacttctttgatgccttcagtttccagcaaacgcacttttaacgcttcgtttgcggcaatgtccgccgggatttcaatgcgcaaactgctgacatacggcggttctttcatggtactggcgactgccagccacactgcggccagcattgcgccagcgagaaataccccctgaccgtcaaacatgccgtcaatccagccgcccagcgaaccgccaatcgccacgccaagaaactggctggtggagtagacacccatcgccgtacctttgtaacctgctggcgactctttactgataagtgagggcagaagggcttccatcaaattaaacgccacaaagaaaagctgcacgccgaccaccagttgccagaactgcgtttgtgcgttccacaacacaatttccgcaaccacgatcaacccgacgcagaagacaaagacttgcttcattttgcgcttaacttcagcgtagataatgaaaggcacgaccgagccaaaggcgattaacatcgtcgccagatagaccttccagtgttcagccgccgggaaccccgcatcagctagctgtccgggcagggcaacaaacgtagacatcagaagcatgtgcagacacataatgccaaagttgagttttagcagccgcggttccgccagcactttactgaaactgcctttcaccattccggactcacgattaagtacgtgagtgctactgttgggcacaacccaaatggtcaacgcaatgccggttgttgccagaatagcgatcatccagaacagcgcgtgcagcccaagtttgtgagtgatgatcgggccaagcaccatcgcaatggcaaaggtaatgccaaagctcacgccgataaacgccatcgctttggtgcggttttgttcgcgcgtgagatcggaaagcagcgccataacggcggcggcaattgctccagagccttgtagcgcccggcccagaataattccccagatggagtcggaaagcgcagcgataacgctaccggcggcaaacaccgccagcccaccgacaattaatggtttgcgaccaatgcggtcggaaagcaggccaaacggaatctgaaaaacggcctgagtcagaccataaataccaatggcaataccgattaatgcttcgctggcaccttgcagagccatgccgtacgtggtcagaaccggcagaaccataaacatgcccagcatgcgcaacgagaatacggtccctaaaccccaggtcgcgcgcctctcacctggcgtcattttataatcgttcattaccaccccttaaaaaaatgcccacatagtgtagtgcggagcgcatgttgggtaaacagagtgttaatgagaaaatattacagaggagagtaatttgtgtgtcaggtatgttttttgcattcataaaatgaatgctctatatgttgaaaaaatgaattttaaaactaaatagttttacatcaaaaaagtaataatatcatttcttgattgctatgtgcatttttatcttacgaatatgctagttttatctcactaaataaacgatttggtgacatggatgataatgtttcaggctaaatgtgtgcttattacttggacctttatggcactgtatttattcattaaatggatatttggtggttaattattatggaaatatatgacagtgaggacataaaggtatacatgttaactaaaagaatattattttctgtaatgctgatagtttcaccaagcgtggtggccagcgagaaagcgcatgaattgtatgacagcatatacggtggtaaacctgctcccgatgttataaatacactgcataaaatggctgaatcgggagatatcgacgcgcagagcctgttaggctgggaatattatcagcctcgttatgataccaaacctgatgttcaggaagcgattaaatggttcgagttagcggctaaacaaggtgacagagaagctccgttagcgctggggggtatctactacgacggtgagcaggtgcgggtggattatgccaaagcgtatgcactatttaatcaggccgcgcagcacggtgggaatttagcatggtccaggttgggcattatgtacgccaatggtcagtatgttgaggtagattgtaagaaagcgaaggaatatcttgataaaggtgtccacatttatggtggcccagaagactttctggctacttgtcgaaaagacatgattgacagaaaaacggttgacgatacgttacccgtgattacggttacccgttctgggatgcgagataattttttagataaaggtttttcctgcatggatagcctcttcgccaccaccaataaattaggcgaagtggccaatcttcgcgtgacattcagcattcgtcgcctatccggtaaggagattaaccaaacggttggcttcgcgcctttcggtttaaaccggctgaatattagctttactgattacctatttggttcatttaccagtaattcgtctcttattctttataaaccggaatttgagcgaaaatcttgtgcaactgtaaggaccacaatcgttgccgcaacggcaaccattaacggcaaggatgtggagttgctgaaagcgggggcaattgaacaaaagtggtaacgctgctcagcccccggctgaggcaaaacttgccctggcgggtggcgataataatctaagccgcgagaatatgctgaatcgccaaaacataggtacagcaccaaaagcatttggtgtcgctgaaagctgaacaaagccgagacgagcataaaaattaatggcggcagggtcagcatcaagataaacccctttaattggtaatgcctggtgaattatttttacatgttcaaaaaaatcacatagtaggtcctgaccaaagccccgcttttgatacttccgtgctacccccaacatgactaatctgacaacaccaatttctgaaggttgtgaaccctgaaggacgccagaaacgcgttgtttttccagcgaatatgccgtaaaagtacagatgccgatcagttcaccactttgtctgtcaataagtgctttagccgcacagtcgctattacgcacacttttctttagcgatgcgcgtacaaatttatcgataacagggttaccgcaatcaaactgtttttgcccaggataagtaatatcagactgataattacaggagaggactatgggcagagtaatctcttcatgcttgtcgaccatcgctgtttttccttttcattaacgccttgagggcgagcgtcggttgagcaggttcagcgatgagttggttcatcagttcccagctttgattcgaaagctcacggcgacgttggttatcaagcacactttcggcgcgttccatagcagcgctcaaaataaaagcgcttaaatctaccccaacggcttgcgcagcttcacgaagtttgtttttggcgtcgggactagttttgagttcgacccgcgcatttttcagcgttttatcgacatcgggtagagtggctgtttttccaggcattatgacctctttgattaactgaatgaaatcgtagggagtcgatctcatacataatacggctatcaaccgtatgattaatttatgttcatctgctcactctgtcaagatatacggttattagccgtatctctgatctcagacaataaaaaaggtgccgtagcacctttttaatagagaggttttgttaccacacagcagccagcagcgtatgcgagtccggtaccataaaatcaacggacatcatcaccgagagggcagtgatggcgatgatagagaagccgaacagcttgcgcgcccagattctgtcatcagcaactttataaccgcgcagagccatacctaaccaccagacgctaaccgccgcggcgaccaccagatatttatatccagcgtaaccgccaagagagagcatcagcgtggcaacggcaaaggcgatgatatacagcgtgatgtgattcttcgccaccgaaatgccttttaccactggcaataccggaatgtttgccgcctggtaatccttaaagcggaaaatggcgatggcataggagtgaggcatctgccacaggctgaagatagccagcaggatcgctgcgccgctatcgaactcgccggttactgcacagtagccaatcaccggcggcgcagcgccggagagcgaaccaatcaatgtgccgtagactgagtggcgtttcatgtacaggctatagacgccgacataaaccacaaagcccatcacccccagccagcaggccagcggattcgcgccaaaccacagcagcataaagccagcaatacccagcaaggtggcgtacaccagcgagacagcaggagagatcaggcctttaaccagcacccgattcttcgtcctttccatctttctgtcgatatccctgtcgatgtagttgttaaacacacaacccgacgccacaaccagtgacaccccaaccagcgtgtagataaacaggggataatcaatgctgccctttgaggccagcaggaatcccccaatcaccgagatcaggttgccaaagatgatgcctggtttcgttacttgcaggtattgcttaaacatcataaccgccgctcttagtgcatcatcatgttgtagttgaggttccacataatccagatggagcctacaaccaggatagcgatgattagcacggtgaagacaaacgccgtcatgttccagccttcatctgatttggtattcatgtgcaggaagcacaccagatgcaccagaacctgtaccactgccattgccaggattgttcccagaattacggccggagaggcagcccctgtcatcaccatccagaacggaatcaccgtcagaatgatcgacaggataaagcctgtcatgtaggtttttacgctgccatgggacgcgccgctgtgatcggtagaatgactcattacatcgcccccatcagataaacaacagtgaacacacagatccaaaccacatccaggaagtgccagaacaggctcaggcacatgatgcgggtacggttagtgctggtcaggccgcgacgagcgatttgtaccatcagcaccgccatccagataagaccggaagtgacgtgcagaccgtgcgtgccgaccagcgcaaagaacgctgacaggaagccgctgcgatccggacccatgccgttaacaatcaggtgatggaattcgtagatttccatcccgataaatccggcaccaaacaaccaggtcaacgccagccaggagataacctggcttttgttgtttttgtacatggcgatagccgccatgccgtaggtgatggagctgaacaacagcaagaaagtttcaaccagaacgaacggcagttcgaaaatgtccttacctgtcgggccgcctgcggtgccgttcaccagaacggcataggtagcaaacaagattgagaacagaatgcagtcgctcatcaggtagatccaaaatccgaagattttggttccgcctgcatcgtggtgcccgtgttcgtgcgcgtgggcagtcgcgtgcgtcaaagtatcagttgccatttttcagccctgccttagtaatctcatcgaaatgctggttttccagtttttcgatttctgccaccggcacgtagtaatccacgtcctcgtcgaagcttttcacgatccaggtgatgatcatgcctgcgaagccaacaatcgccagccaccagatatgccagatcatggcgaaaccgaagatggtggagaaagctgcaatgacgatacctgcaccgctgtttttcggcatatgaatttcttcatagtggtcaggctttttatacgcttcgcctttctctttcatttcccagaatgcatcacgctcgtgaacgtgcggcacaacggcaaagttatagaacggaggcggggaagaggttgcccactccagcgtacggccaccccacgggtcgccagtcaggtcacggttctggtcgcggtcgcgaatagaaacgtacatctgaataacgaggcagagaatacccagcgcaatcagtactgcaccgctagctgcaatcatcagcatggtgtggaactgcgggtcaatctgctggctcaaacgacgggtcatgcccatgaagcccagcgcatacagcggcataaaggcaacgaagaagccgatgatccagaaccagaacgcgcgtttaccccaggtttcattcagtttgaaaccgaaggctttaggccaccagtaggtcatccctgcgaagcagccgaagaccacgccgccgatgatcacgttatggaagtgcgcaatcaggaacaggctgttatgcagaacgaagtccgcgcccggtactgccagcagcacgccagtcatcccgcccaccgagaaagtgacgataaaaccgatggtccacagcatcgcagaatggaacacgatgcggccctgatacatggtgaacagccagttgaagatcttcaccccggtcgggatggcgataatcattgtggtgataccaaagaaggcgtttacgttcgcgcccgcacccatcgtaaagaagtggtgcagccaaacgatgaacgacagcacggtgatacagacggttgcccataccagcgaggtataaccaaacagacgtttacgcgagaaggttgccgcaatttcggagaacacaccgaaaacaggcaggatcaggatgtaaacttccgggtggccccaggcccaaatcaggttgatgtacatcatcatgttgccacccatatcgttggtaaagaaatgggtgcccagatagcgatccagggtcaacaacgcgacggtaaccgtcagaattgggaaggaagcaataatcagtacgttcgcgcacagtgatgcccaggtaaatactggcatcttgaacatggtcatgcccggtgcgcgcatcttcagaatggtaacgaagaagttgataccggtaagcgtcgtacctataccggatagctggagactccatatccagtaatcgacaccgactcccggactgtactctattcccgatagcggtggataggccagccagccggtctgcgcaaattcgcccacgccgagagaaacgttaaccagaatcacaccaacaacagtaaaccagaagcttaagttgttgaggaacgggaacgcaacgtcacgcgcgccgatctgcagcggaaccaccaggttcatcagaccgataacgaaaggcatcgccacgaagaagatcataatcacgccgtgcgcggtgaagatctgatcgtagtggtgaggtggcaggaagcccgcttcgcccgccgaggcaagagcctgctggctacgcatcataatggcgtcagcaaaaccacgcagcaacatcacaatcgccacgatgatatacatgataccgaggcgtttatggtcgacggaggtcagccactctttccacaggtaggtccacttaccgaagtaagtgatcaggccaacgagcgccagacctcccaaaataatgccagcgatcgtaaccatgacgataggttcatggaacgggactgcatcaagtgataattttccgaacatctttattcttcctcaacccctttaatgggcggattccgcgtggctcatgtccatgccttccataccttcgtgtgcactgtgctcaccttctggctgggtcatgtccatgctcttaccgtgagccataaacttgttaatcacatcggcaaacaagtctggtttcacgttggagaaatattccacctggttgtattcgctaggcgcggccagtttttcgaacgcagccatgtcagacatggtgttcggcgactgtttcgcttttgcgacccattggtcgaattcggcgcgatccggtgttgcaatagctttgaacttcatgcctgagaagcccggcccgctgtagctggcggagataccgtcataagtaccgggttcgttggcgatcagatgcaggcgagtctgcataccggccatggcataaatctggctacccagacgcggaatgaagaaggagttcatcacggagttggaggtcactttgaagtacaccggagtgttcgccgggaaagcgatttcattcacggtagcaatgccctgttccgggtagatgaagaaccatttccagtccatggaaaccacttcgatggtaatgggcttctcgtcgtgtgccagcggcttgctaggctcaagagcgtgagtggttttccaggtcagtaccgcaaggaagatgatgattaagataggtaccgtccagaccacagcttccactttattggagtgtgaccagttcgggctgtacttagcatctttattgctcgcacgatacttccaggcgaaaccaacagccatcaagattgcgggaataacgacaatcaacatcaggccaaatgccgtcagtatcagtgaacgttgctccagaccaatctgtcctttgggatctaacagcgcagaattacagccactgagcaatacagtgcctgcaaataatgacaaccatcccaaacttttattgtatttcctgagtctcatttaacgacctcaattccacgggatctggtggcgtttaaagtgtgtgggcattttacgggaaggttacattactgtaaacatgattaaattcctgttacttggatttggctgtcaggtcacatatgttgcaaaacatatcaagttgattttaagaagctgttgcaaaagggcgttataacgaaaggggagtgcagaaggagtttggacgggcaattggtataaccaatctggaataaaacaattgtttaacaaataattatcattatggtgacaattgggtgggggaaaataaagactcattagctgaatcgtgtaagaaaaaatagaattcataaattgcgtcaataatttccaaacgctaagccgcacaaaagaacaaatattattaagcgatactgatgtttatttagccgtaataattacggcgagtgattactacagctaaataatatttacagattacgtcagatgcgtttttcgtagcgccagataatccagcaaaccaccaagcacgacgccagaaagggcgactaaaaccccgacttccagcagagcaggcaggaaagagaagtgcgtcaaatccagcgcgtccatcgtcaacagcagtaaccacacggccaacaggctgacgcccgccgccagtgtccacatggcaaaggcataacctgccggatattcggtacgggagataaagttgtcatttactcgtgtatattcaagcgtctggcggcaaaccagcagcaaaataagccccggtacggcagcggcgacggagaatagatagaatgtcgaccagccgtgtgcttcaacaaaccaacccgccacggggccgacataaactcgccctacagcggaaagcgctgagagcagggcaaattgagttgcggaaaatgacttattacacagcgtcattaacagcgcgacaaaggctgatgtgcccatcccgccacagaggttttcgaaaaagacggctgcgcccatgctgtagagatgcttatcagtaatcgacagcagccagtaaccagcgttagacgcaccttgtaaaatgccgaaaatcagcagcgcccggaacagcgacaggcgctgcatcaaaatcccaccgtacaatgcgcccacaatggtcgccagtaagccaagcgttttgttaaccacgcctacttcacccgcatcaaacccgacgccgcgaatcaaaaacgtggttgtcaggctcatggcgaatgcgtcgcccagcttatacagcacgataagaagcaaaataagccaggcattattgcgaccaaagaaatctcgcagaggtgcaacaaccgcttgttccagcgtttttggcacaggaatggtgtcggtcggttctggtgcaagcaacgtcgcgataatacaagggatcaacagcgccgccatcaaccagtacatgccctgccagcccagccatttatctgccagccacagggctaagccgccggaaaccagcatccctaaacggtaacccagcacgctgattgccgcgcccgcaccacgttcttctgccgggagcacatcggttttccacgcatcgaagacaatatcctgggaggccgagcaaaaagcgatcaccaccgccagtgccgccatccagcggagttgggtgccaggttcgagaaaacccatcgccgcaatggcgactaataacaggatttgcgtggcgagcagccaaccgcgccgccgcccaaaaaatgggggcgtgtagcggtccatcagcggtgaccagaggaatttaaaaacgtaagcctggcctaccagagagaagaaaccaatggttttgagatcaatattctcgaccgtcatccaggcctgtaaggtaccggatgtcagggcgagcggtagcccggaagcaaaacccaggatcagcaatatggctgaacgcggctgttgaaaaatacgtaaatattgactggacatgggcgtctacaggcccggtttgcaccgggccagagggcagaaattaacgcgcgttctgcttgataaattcgtgaatgctggtgtcctgagacatatcagcgatggtatcggtcagcacactgttaaccgcatcggcgatatttttgttggaggcctggaacgcaccttcaacgttgtagctggcacgatagtttttggtcattttgttgccattctgcgcggtagcgatgatggcgatatccgctttggtagcgatgttatagcgcacgttgccctgggacacgtcagcatacagttggctaacgatgatttgcagattaaccgggccattcggaccaaccatgtaaccacgcgcggtcatctgtttttccagcacttcttgcagcaggaaacgcagatcgcgggaggcggtcagggtaacgatttgattatcgcgggtgacttttgccagcgcctgatcggtacgctgatcggcaccattaatgcttacggtgacgcccatcaggcttggatcctgcagtggcagtgtaatcgtcggggaaacttcaatagttgttggcggttttgcgcatcctgcaagcataaacagagcaactaacgggaagaggatttttttgaacatgttcgggctctcagagactcttaagcgtgtttggtaaaaattcccgccatcataacattgccaacggcgaggggaagtgggtaaggcatgtaaattcatcatgttgacgaaataatcgcccctggcaaaagaaacactgatgcgaggcctgtgtttcaatctttaaatcagtaaacttcatacgcttgacggaaaaaccaggacgaaacctaaatatttgttgttaagctgcaatggaaacggtaaaagcggctagtatttaaagggatggatgacatctcagcgttgtcggaggagatatttcatgatgatacgtgagcggatagaagaaaaattaagggcggcgttccaacccgtattcctcgaagtagtggatgaaagctatcgtcacaatgtcccagccggctctgaaagccattttaaagttgtgctggtcagcgatcgttttacgggtgaacgttttctgaatcgtcatcgaatgatttacagtactttagcggaggaactctctactaccgttcatgcgctggctctgcatacttacactattaaggagtgggaagggttgcaggacaccgtctttgcctctcctccctgtcgtggagcaggaagcatcgcgtaaaaacgcatttgcaactgtcggcgcttttccagtatgttgctaaagattttatgaaaaacggcctacgggccgttttgttttgtctgaattttgcgctttttgcccagcattcagacgaaaattgcccgggaattgtgaaaaaatacgcgacagcgcgcaataaccgttctcgactcataaaagtgatgccgctataatgccgcgtcctatttgaatgctttcgggatgattctggtaacagggaatgtgattgattataagaacatcccggttccgcgaagccaacaacctgtgcttgcggggtaagagttgaccgagcactgtgattttttgaggtaacaagatgcaagtttcagttgaaaccactcaaggccttggccgccgtgtaacgattactatcgctgctgacagcatcgagaccgctgttaaaagcgagctggtcaacgttgcgaaaaaagtacgtattgacggcttccgcaaaggcaaagtgccaatgaatatcgttgctcagcgttatggcgcgtctgtacgccaggacgttctgggtgacctgatgagccgtaacttcattgacgccatcattaaagaaaaaatcaatccggctggcgcaccgacttatgttccgggcgaatacaagctgggtgaagacttcacctactctgtagagtttgaagtttatccggaagttgaactgcagggtctggaagcgatcgaagttgaaaaaccgatcgttgaagtgaccgatgctgacgttgacggcatgctggatactctgcgtaaacagcaggcaacctggaaagaaaaagacggcgctgttgaagcagaagaccgcgtaaccatcgacttcaccggttctgtagacggcgaagagttcgaaggcggtaaagcgtctgatttcgtactggcgatgggccagggtcgtatgatcccgggctttgaagacggtatcaaaggccacaaagctggcgaagagttcaccatcgacgtgaccttcccggaagaataccacgcagaaaacctgaaaggtaaagcagcgaaattcgctatcaacctgaagaaagttgaagagcgtgaactgccggaactgactgcagaattcatcaaacgtttcggcgttgaagatggttccgtagaaggtctgcgcgctgaagtgcgtaaaaacatggagcgcgagctgaagagcgccatccgtaaccgcgttaagtctcaggcgatcgaaggtctggtaaaagctaacgacatcgacgtaccggctgcgctgatcgacagcgaaatcgacgttctgcgtcgccaggctgcacagcgtttcggtggcaacgaaaaacaagctctggaactgccgcgcgaactgttcgaagaacaggctaaacgtcgcgtagttgttggcctgctgctgggcgaagttatccgcaccaacgagctgaaagctgacgaagagcgcgtgaaaggcctgatcgaagagatggcttctgcgtacgaagatccgaaagaagttatcgagttctacagcaaaaacaaagaactgatggacaacatgcgcaatgttgctctggaagaacaggctgttgaagctgtactggcgaaagcgaaagtgactgaaaaagaaaccactttcaacgagctgatgaaccagcaggcgtaatttacgcagcataacgcgctaaattcgcacaaaggcccgtcaccgccaggtggtgggcttttttttgtcatgaattttgcatggaaccgtgcgaaaagcctctttcggtgttagcgtaacaacaaaagattgttatgcttgaaatatggtgatgccgtacccataacacagggactagctgataatccgtccataaggttacaatcggtacagcaggttttttcaattttatccaggagacggaaatgtcatacagcggcgaacgagataactttgcaccccatatggcgctggtgccgatggtcattgaacagacctcacgtggtgagcgctcttttgatatctattctcgtctacttaaggaacgcgtcatttttctgactggccaggttgaagaccacatggctaacctgattgtggcgcagatgctgttcctggaagcagaaaacccagaaaaagatatctatctgtacattaactccccaggcggggtgatcactgccgggatgtctatctatgacaccatgcagtttatcaagcctgatgtcagcaccatctgtatgggccaggcggcctcgatgggcgctttcttgctgaccgcaggggcaaaaggtaaacgtttttgcctgccgaattcgcgcgtgatgattcaccaaccgttgggcggctaccagggccaggcgaccgatatcgaaattcatgcccgtgaaattctgaaagttaaagggcgcatgaatgaacttatggcgcttcatacgggtcaatcattagaacagattgaacgtgataccgagcgcgatcgcttcctttccgcccctgaagcggtggaatacggtctggtcgattcgattctgacccatcgtaattgatgccagaggcgcaactgtgccgctatacttatccagggcggcacaacgctgtaagcggcttgcgcctgagaatggcatttgcgtcgtcgtgtgcggcacaaagaacaaagaagaggttttgacccatgacagataaacgcaaagatggctcaggcaaattgctgtattgctctttttgcggcaaaagccagcatgaagtgcgcaagctgattgccggtccatccgtgtatatctgcgacgaatgtgttgatttatgtaacgacatcattcgcgaagagattaaagaagttgcaccgcatcgtgaacgcagtgcgctaccgacgccgcatgaaattcgcaaccacctggacgattacgttatcggccaggaacaggcgaaaaaagtgctggcggtcgcggtatacaaccattacaaacgtctgcgcaacggcgataccagcaatggtgtcgagttgggcaaaagtaacattctgctgatcggtccgaccggttccggtaaaacgctgctggctgaaacgctggcgcgcctgctggacgtcccgttcaccatggccgacgcaaccacgctgaccgaagccggttatgtgggcgaagacgttgaaaacatcattcagaaactgttgcagaaatgcgactacgatgtccagaaagcacagcgtggtattgtctacatcgatgaaatcgacaagatttctcgtaagtcggacaacccgtctattacccgtgacgtttccggtgaaggcgtacagcaggcactgttgaaactgatcgaaggtactgttgctgccgttccaccgcagggcgggcgtaagcatccgcagcaggaatttttgcaggttgatacctccaagatcctgtttatttgtggcggtgcgtttgccggtctggataaagtgatttcccaccgtgtagaaaccggctccggcattggttttggcgcgacggtaaaagcgaagtccgacaaagcaagcgaaggcgagctgctggcgcaggttgaaccggaagatctgatcaagtttggtcttatccctgagttcattggtcgtctgccggttgtcgcaacgttgaatgaactgagcgaagaagctctgattcagatcctcaaagagccgaaaaacgccctgaccaagcagtatcaggcgctgtttaatctggaaggcgtggatctggaattccgtgacgaggcgctggatgctatcgctaagaaagcgatggcgcgtaaaaccggtgcccgtggcctgcgttccatcgtagaagccgcactgctcgataccatgtacgatctgccgtccatggaagacgtcgaaaaagtggttatcgacgagtcggtaattgatggtcaaagcaaaccgttgctgatttatggtaagccggaagcgcaacaggcatctggtgaataattaaccattcccatacaattagttaaccaaaaaggggggattttatctcccctttaatttttcctctattctcggcgttgaatgtgggggaaacatccccatatactgacgtacatgttaatagatggcgtgaagcacagtcgtgtcatctgattacctggcggaaattaaactaagagagagctctatgaatcctgagcgttctgaacgcattgaaatccccgtattgccgctgcgcgatgtggtggtttatccgcacatggtcatccccttatttgtcgggcgggaaaaatctatccgttgtctggaagcggcgatggaccatgataaaaaattatgctggtcgcgcagaaagaagcttcaacggatgagccgggtgtaaacgatcttttcaccgtcgggaccgtggcctctatattgcagatgctgaaactgcctgacggcaccgtcaaagtgctggtcgaggggttacagcgcgcgcgtatttctgcgctctctgacaatggcgaacacttttctgcgaaggcggagtatctggagtcgccgaccattgatgagcgggaacaggaagtgctggtgcgtactgcaatcagccagttcgaaggctacatcaagctgaacaaaaaaatcccaccagaagtgctgacgtcgctgaatagcatcgacgatccggcgcgtctggcggataccattgctgcacatatgccgctgaaactggctgacaaacagtccgttctggagatgtccgacgttaacgaacgtctggaatatctgatggcaatgatggaatcggaaatcgatctgctgcaggttgagaaacgcattcgcaaccgcgttaaaaagcagatggagaaatcccagcgtgagtactatctgaacgagcaaatgaaagctattcagaaagaactcggtgaaatggacgacgcgccggacgaaaacgaagccctgaagcgcaaaatcgacgcggcgaagatgccgaaagaggcaaaagagaaagcggaagcagagttgcagaagctgaaaatgatgtctccgatgtcggcagaagcgaccgtagtgcgtggttatatcgactggatggtacaggtaccgtggaatgcgcgcagcaaggtcaaaaaagacctgcgtcaggcgcaggaaacccttgataccgaccattatggtctggagcgcgtgaaagatcgcatccttgagtaccttgcggttcaaagccgtgtcaacaaaatcaagggaccgatcctctgcctggtagggccgccgggggtaggtaaaacctctcttggtcagtccattgccaaagccaccgggcgtaaatatgtccgtatggcgctgggcggcgtgcgtgatgaagcggaaatccgtggtcaccgccgtacttacatcggttctatgccgggtaaactgatccagaaaatggcgaaagtgggcgtgaaaaacccgctgttcctgcttgatgagatcgacaaaatgtcttctgacatgcgaggcgatccggcctctgcactgcttgaagtgctggatccagagcagaacgtagcgttcagcgaccactacctggaagtggattacgatctcagcgacgtgatgtttgtcgcgacgtcgaactccatgaacattccggcaccgctgctggatcgtatggaagtgattcgcctctccggttataccgaagatgaaaaactgaacatcgccaaacgtcacctgctgccgaagcagattgaacgtaatgcactgaaaaaaggtgagctgaccgtcgacgatagcgccattatcggcattattcgttactacacccgtgaggcgggcgtgcgtggtctggagcgtgaaatctccaaactgtgccgcaaagcggttaagcagttactgctcgataagtcattaaaacatatcgaaattaacggcgataacctgcatgactacctcggtgttcagcgtttcgactatggtcgcgctgataacgaaaaccgtgtcggtcaggtaaccggtctggcgtggacggaagtgggcggtgacttgctgaccattgaaaccgcatgtgttccgggtaaaggcaaactgacctataccggttcgctcggcgaagtgatgcaggagtctattcaggcggcgttaacggtggttcgtgcgcgtgcggaaaaactggggatcaaccctgatttttacgaaaaacgtgacatccacgtccacgttccggaaggtgcgacgccgaaagatggtccgagtgccggtattgctatgtgcaccgcgctggtttcttgcctgaccggtaacccggttcgtgccgatgtggcaatgaccggtgagatcactctgcgtggtcaggtactgccgatcggtggtttgaaagaaaaactcctggcagcgcatcgcggcgggattaaaacagtgctaattccgttcgaaaataaacgcgatctggaagagattcctgacaacgtaattgccgatctggacattcatcctgtgaagcgcattgaggaagttctgactctggcgctacaaaatgaaccgtctggtatgcaggttgtgactgcaaaatagtgacctcgcgcaaaatgcactaataaaaacagggctggcaggctaattcgggcttgccagcctttttttgtctcgctaagttagatggcggatcgggcttgcccttattaaggggtgttgtaaggggatggctggcctgatataactgctgcgcgttcgtaccttgaaggattcaagtgcgatataaattataaagaggaagagaagagtgaataaatctcaattgatcgacaagattgctgcaggggctgatatctctaaagctgcggctggccgtgcgttagatgctattattgcttccgtaactgaatctctgaaagaaggggatgatgtagcactggtaggttttggtacttttgccgttaaagagcgtgctgcccgtactggccgcaacccgcagaccggtaaagagatcaccatcgctgctgctaaagtaccgagcttccgtgcaggtaaagcactgaaagacgcggtaaactaagcgttgtccccggtggggatgtgacgaagttcaagggcgcatctactgatgtgccttttttatttgtattcggtgactttctgcgtcttgtgggctgacaattgcccccgtttcttgtcacaataggcctttgcgcgcatcgatacgttgcgtgaggtacacagtcatctacagcggagtgttgttacaccatgatggacagcttacgcacggctgcaaacagtctcgtgctcaagattattttcggtatcattatcgtgtcgttcatattgaccggcgtgagtggttacctgattggcggaggcaataactacgccgcaaaagtgaatgaccaggaaatcagccgtgggcagttcgagaacgcctttaacagcgagcgtaatcgcatgcagcaacagctgggcgatcaatactccgagctggcagcgaatgaaggctatatgaaaaccctgcgtcaacaggtgctgaatcgtctgatcgacgaggcgctgttggatcagtacgctcgtgagctgaaactgggtatcagtgatgagcaggttaaacaggcgattttcgcgaccccagccttccaggttgacggcaaatttgataacagccgctataacggtatcctcaaccagatggggatgaccgccgatcagtacgcccaggcgctgcgtaaccagctcactacccaacagctgattaacggtgttgccggtaccgattttatgctgaaaggtgaaaccgacgagctggcggcactggtcgcgcaacaacgcgtggtgcgtgaggcgactatcgatgttaacgcgctggcggcgaagcagcctgtgaccgaacaggagattgccagctactacgaacaaaacaaaaacaatttcatgacgccggaacaattccgcgtgagttacatcaagctggatgccgcaacgatgcagcaaccggttagcgatgcggatatccagagctactacgatcagcatcaggatcaattcacccagccgcagcgtacccgctacagcatcatccagaccaaaactgaagatgaagcgaaagcggtacttgatgagctgaataaaggcggtgattttgctgcattagccaaagaaaaatctgccgatattatctctgcccgtaacggcggcgatatgggttggttagaagatgccactatccccgacgaactgaaaaatgctggtctgaaagaaaaagggcaactgtctggtgtcatcaaatcttcggtcggtttcctgattgtacgtctggacgacattcagccagcgaaagtgaaatcgttagacgaagtacgtgacgacattgcggcgaaagtgaaacacgaaaaagccctcgatgcgtactatgcgctgcagcagaaagtgagcgatgcggcaagcaacgacaccgagtctctggccggtgcagagcaagctgctggcgttaaagccactcagacgggttggttcagcaaagataacctgccggaagagttgaacttcaagccggttgccgacgctatctttaacggcggtctggtaggtgaaaacggcgcgccgggcatcaactctgacatcatcaccgtagacggcgaccgcgcattcgtgctgcgcatcagcgagcacaaaccggaagcggtgaaaccgttggcagatgttcaggaacaagttaaggcattggttcagcacaacaaagctcaacaacaggcgaaagtggatgctgagaaactgctggttgatttgaaagccggcaaaggtgcggaagctatgcaggctgccggtctgaaatttggcgagccgaaaaccttaagccgttccggtcgtgacccgattagccaggcggcgtttgcactgccactgccagcgaaagacaaaccgagctacggtatggcgaccgatatgcaaggtaatgtggttctgctggcgctggatgaagtgaaacaaggttcaatgccggaagatcagaaaaaagcgatggtgcagggtatcacccagaacaacgcacaaatcgtctttgaagctctgatgagtaacctgcgtaaagaggcgaaaatcaaaattggcgatgcgctggaacagcaataatcctgaagccgcctcgcaaaaaaatgcgttgcagctgtaacaagaaaaaggtcgctttcgcggccttttccatttctgaacattgccatttgtttactgttttcactgccgttaaggtgattccactgttaacaaacaaggagaaaacagtatgaaacacggaattaaagcactgctcattaccctgtccctggcctgtgccggaatgtctcatagcgcgctggcggcagcttctgtggcgaaaccgacaacggtagaaaccaaagcggaagctcctgcagcacaaagtaaagcagcagtaccggcgaaagccagtgacgaagaaggcacccgggtcagcattaataatgccagcgcggaagagctagcccgcgcgatgaatggcgttggcctgaagaaagcgcaggcgattgtcagttatcgcgaagagtacggtccgtttaaaacggtggaggatctaaagcaggtgccggggatgggcaattcgctggtggaacgtaatctggcggtattaaccctgtaattaatttgcatagtggcaatttttgccagactgaagaggtcataccagttatgacctctgtacttataacaacaacgtaaggttattgcgctatgcaaacacaaatcaaagttcgtggatatcatctcgacgtttaccagcacgtcaacaacgcccgctaccttgaatttctcgaagaagcccgctgggatgggttggaaaatagcgacagttttcagtggatgacggcccataacatcgccttcgtcgtggtcaatatcaatattaactatcgtcgcccagcggtattaagtgacctgttaactattaccagtcagttgcagcaattaaacggtaaaagcggcatcttaagccaggtcattacactggagccggaagggcaggtggtagcggatgcgcttattacgtttgtttgtattgatcttaaaacgcagaaagcattagctctggaaggggaattgcgcgaaaagctggagcagatggttaagtaaacgttttgtggtgccggatgctcaagccgcatccggcgacacccggaataattacctcaacccggttttctgcttcatcgctgccatcaccgtcggtttatcggccagataatgattcaaaccgttggcgcgtaaattacatgccgcacaatgaccgcaaccgtcgcctttaatgccgttatagcaggtcaacgtttcgttacggactaaatccagtttgccgtaataatctgccagcgcccaggtttccgctttatcaatccacatcagcggcgtttcaaaacgaatatctttcgccatgcccaaactgacggcatggtttagtgctttcacaaactcatcgcggcaatccgggtagccggagaaatccgtttcacagacgccggtaattacggcttctgcttttacctgatacgcatatattgccgccagcgtcaggaacaaaatattacgccctgggacaaacgtattcgggatgccatcggcttcaggttcataatcaggcaccggaatgctgtcacgtgtcaggctgctgaccgccagctcgttgagcagcgttacatcaagaaccttacgcgcgcgtgctcccagtttcagcgccagttcgcgtgccacgtcgatttctgcgcgatgtcgctgaccgtaatcgaacgtcacgcaatggacttcatcatattgttgtaatgcctgcaccagacaggtggtggaatcctggcctccactgaacacaacgacagcacgtttcatagataatcctgcttgaacaataaaagcgttatggtaacgcctgcgattaacccggaccagctattcattgcgacggcgcgggaagccaggcttcggtaaattcaaaccagccgcgcggtgtcagtcgcacaccgttcacgccgggaggggcactaatgcgatagtgatagttgaacagcggcgtcagcgtcgcgtctgccattaactggctaaaaaccgctttcagggcattaaatcggttttcctcatcaggcattacttgcaccgcgtccagcgtcgattgcagatgtgcatatgctggagcgtcgaaaacatgtggccatagtggatcgcaacgtagccattgctccagagtatattccggtgcttcgccaattaatctgtcgcccatcatgaggtctgcgtgtgccagtagggtcgtgtcgtcccagttttttgcgttatgaaaaataattgtgagttcacagccttccgctgccagtgtcgcctgtaggcgttctgccatggtatgaagttctatcggtaggtgataaaccagcgtcaaggttttcggtagtttgacttcatccggtacttgccagtacggaatagtccagcctggcagtaatgcatgactggcggtgatcaggttttctccgacttctaacgtttgtaataaaccggattgatgaataatggagatcacttttcgcgcctgccagagggagagtcggggacttttgcgcaacgttaaatagcaaaaacctaaactgatgccactactgacctggctgacccgttgcagctcctccggtttgccgatggtgatttgcacgggatgccgacaactgtttcccaaatctttttcgaaaagcggcggagttatccagtactcaaccgctttaagcagcggatgacgcaaatggtaataatcatggctctccaggcgcaccagctccgctgtgaattgtgttaagcgaaaaggaccagtgccgatcagtgggaattgcggatgcgccagatggctgcaatagctcgccagccggtgcgcaagccagtaatcggggcgatgtaaaaagaaggtcagacactgcggatgggtgacttcaatacgcttcacgctaataaataattgatccagtgctggcagttgtaacagcatcaataatcgctggtgtaagtgtgaggcttttactgcatcgccgttatgccagtgtagggttgaacgaagataaaagtcccagcgtaacccgtcagtagaggtttcccagtgatgcgctaaatcgccaatcgggcgctgagtattattatcgaagcgggtcaggccggaaaatatctgcccggcgagatgctgctcggcacggccgggcaaaagcctggttgtagcggttcgagcgggcgatagtagggaatacgcaacgtgggtgtatcgttttgccattgtccgcccataaacggctgtaacagagtgcgcagctcacctggggccagttgcgccagctccagcacatcttgctgctttccggtttccagtgcctgttccatcatcgcattgcgtagcgattccggcgtgaccagaaagcgtaattgtccgcgctttccgcgtcctgactgcgcctgccactccagccatcccgcctcctgtgcctgacgcaacagcgtacgaacatggcgttcgctgcaaaaacagcgttcggccagttcgctgacggtgacggtttgcggctttccggctgaaggttgccacagacgttgatactggttaagacggttgagcaatcgcatataaacccggaacaatattatttaactattcactattacttccgtatatatcaggtgatactcaatcaccattaaccgtgtcacagagtggagaaagaaatggctcgtctggcagcatttgatatggatggcactttattgatgcctgaccatcatttaggtgagaaaaccctctctactttggcgcgactgcgtgaacgcgacattaccctcacttttgccacggggcgtcatgcgctggagatgcagcatattctcggggcgctatcgctggatgcatatttgattaccggcaacggaacgcgcgtgcattctctggaaggtgaacttttacatcgtgatgatttacctgcggatgtcgcggagctggtgctgtatcagcaatgggatacccgagccagcatgcatatcttcaatgacgacggttggtttaccgggaaagagatccctgcgttgttgcaggcatttgtctatagcggttttcgttatcagataatcgatgtcaaaaaaatgccactcggcagagtcaccaagatctgcttctgtggcggtcacgacgatcttacacgcttgcagatccagctatacgaagcattaggcgagcgtgcacatttgtgtttttccgccacggattgcctcgaagtgctgccggtgggctgcaataaaggcgctgcattgacggtgctgacccaacatttaggtttatcgttgcgcgattgcatggcctttggtgatgcgatgaacgatcgcgaaatgttaggcagcgtcggtagcgggtttattatgggcaatgcgatgccgcaactgcgcgcggagctcccgcatttaccggtgattggacattgccgaaatcaggctgtctctcactatttgacgcactggctggactatccacatctaccttattcccccgaataacgagatcccttccagcaccgggcaattgcccggttttttttgcgttgaatttgtcattttgtgccgtggtgtttaaaccgcacagaataaattgtcgtgatttcacctttaaaatagaattaaaagagaaaaaaattctctgtggaagggctatgttagataaaattgaccgtaagctgctggccttactgcagcaggattgcaccctctctttgcaggcactggctgaagccgttaatctgacaaccaccccttgctggaagcgcctgaaacggctggaggacgacggtatccttatcggcaaagtcgccctgctggatccggaaaaataggcctcggcctgaccgcctttgtgctgataaaaacgcaacatcacagcagcgaatggtattgccgctttgtcacggtggttaccgaaatgccagaagtgctggggttctggcgcatggctggtgaatacgattatctgatgcgcgtccaggttgccgacatgaaacgctacgacgagttttataagcgtctggtaaacagcgtgccggggctgtcggacgtcacttccagcttcgcgatggaacagattaaatacaccacttctttacccatcgaataaatatccagaatcaggtcaggacacaacgcgtgcgattatttgctcaattaagctggtatttccgtcgggaatggcgtcgctatctcggggctgtcgccttgcttgtcattatcgcgatgctgcaactggttccgccaaaagtggttggtattgttgtcgatggcgtgacagaacaacactttactaccgggcagatcctgatgtggatcgccaccatggtgctgattgccgttgtggtttatctcctgcgttacgtctggcgggtattgctgtttggtgcgtcttatcaactggctgttgaactgcgtgaagattattaccgtcagctaagccggcagcatcctgagttttacctgcgtcatcgcacgggtgatctcatggctcgtgcgaccaatgacgtcgatcgcgtcgtgtttgccgccggagaaggggtgctgacgctggtggattcactggtgatgggctgcgctgtgttgattatgatgtctacgcaaattagctggcagttgaccttatttgccctgttgccgatgccagtgatggcgatcatgatcaagcgcaacggcgatgccttgcatgaacgctttaagctggcacaggcggcgttttctagtcttaatgaccgcacccaggaaagcctcaccagtatccgcatgatcaaagcctttggtctggaagatcgccagtcggcgttatttgccgcggatgccgaagataccggcaaaaaaaacatgcgggtggcgcgtattgatgctcgtttcgacccaaccatctatatcgcgattggtatggcgaacttgctggcgattggcggcggtagttggatggtggcgcagggcagtttaacgctgggccagctcaccagttttatgatgtatttaggtctgatgatttggccaatgctggcgctggcatggatgtttaacattgtggaacgtggtagtgctgcatacagccgtattcgcgcgatgctggcggaagcgccggtggtgaacgatggtagcgaacccgtgccggaagggcgtggcgaactggatgtaaatattcaccagttcacgtatccgcagactgaccatcctgcgctggaaaacgtcaatttcgccctgaaacccggtcagatgctgggtatctgcgggccgactggttccggcaaaagtaccctgttgtcgctcattcagcgtcatttcgacgtcagcgagggggatattcgctttcatgatattcctctgacgaagttacaactcgatagctggcgtagccgcctggcggtggtcagccagacgccattccttttttctgacaccgtggcgaataacatcgcgctgggttgcccgaatgccacccagcaagagattgaacacgtagcgcggttagccagcgtacatgacgatattttgcgtctgccgcaaggttacgatacagaagtgggcgagcgcggcgtgatgctttccggtgggcaaaaacagcgtatctccattgctcgagcgttattagtcaacgcggaaatcctcatccttgatgatgcgctttcggcggtggacggacgcacagagcaccagatcctgcataacctgcgtcagtggggacagggaagaacggtaatcatcagtgcccatcgcctttcggcactgacggaagccagtgaaattattgtgatgcagcacggacatatcgcccagcgtggcaatcatgatgagctggcgcaacaaagcggctggtatcgcgatatgtatcgctatcaacaactggaggcggcgctcgacgacgttccggaaattcgcgaggaggccgtcgatgcgtagttttagccaactgtggccgactctcaagcgtctgttagcgtacggttcgccgtggcggaaaccgctggggattgcggtcctgatgatgtgggttgcggcagcggcagaagtcagtgggccgctgcttatcagctattttatcgacaatatggtagcgaaaaataacctgccgttgaaaatggttgcagggctggcggcggcgtatgttgggctacaactgtttgccgccgggctacattacgcgcagtcgctgctgtttaatcgggcggcagtaggcgtagtgcaacagttgcgtaccgacgtgatggatgctgcgttacgccagccattaagcgagtttgatacccaacccgtcgggcaggtgatttcccgcgtcactaatgacactgaagtgatccgcgatctctacgttaccgtagtggcaactgtcctgcgtagcgccgcactggtgggcgcgatgctggtggcaatgttcagcctcgactggcgaatggcgctggtggcgataatgattttcccggtagtgctggtggtaatggtgatatatcaacgttacagcacgccgattgtccgtcgtgtgcgcgcctatctggcggatatcaacgacggctttaacgaaatcatcaatggcatgagcgttatccagcagttccgtcagcaggcgcgatttggcgaacgtatgggtgaggccagtcgttcacactatatggcgaggatgcaaaccctgcgcctcgacggttttctgctgcgtccgctgctgagtctgttttcatcgctcattctttgtggcttgttgatgctgtttggcttctccgccagcggcaccattgaagtgggcgtgttatatgcgtttatcagctatcttgggcgacttaacgaacccttaatcgaactgaccacgcagcaggcgatgctgcaacaggctgttgttgctggtgagcgcgtgtttgaactgatggacggaccgcgccagcaatatggcaatgatgatcgcccgttacagagcggcaccatcgaagtcgataacgtgtcatttgcttatcgcgatgacaatctggtgctaaagaacattaatctctctgtgccttcgcgtaactttgtggcgctggtcgggcataccggcagtggcaaaagcaccctcgccagtttattgatgggctattacccgctaacggaaggtgagattcgccttgatggtcgtccattaagttcgctaagtcacagcgcgctgcgccagggcgtggcaatggtgcagcaagatccggtggtgctggcggataccttcctcgccaacgtgacgctgggacgtgatatctccgaagaacgcgtctggcaggcgctggaaaccgtgcaactggcggagctggcgcgcagcatgagtgatggtatttatacgccgctgggcgagcagggaaataatctctcagtcgggcaaaagcaactgctggcactggcgcgcgtgctggtggagacgccgcaaatcctgatccttgatgaggcaaccgccagcattgactccggtactgaacaggcgattcaacatgctctggcggcggtgcgtgaacataccacgctggtggtgattgctcaccgcttatcaactattgttgatgccgacaccattctggtgcttcatcgtggacaagccgtggagcagggcactcaccagcaactgctggcggcccagggacgctactggcagatgtatcaactgcaacttgcgggcgaagagctggcagccagcgtgcgtgaagaagaatcattgagcgcctgaatagcgcaatatttcatcgttggtgcaaaaatgtaacgcactgtgcactgtcatagtgcgttttcattttcaatcttcttaacttcctgctctctttctcgtttttcatttctggcacaccgcttgcaataccttcttcgtgtagcagaaccattaccgaattctgaccggaggggatctatgaagctggtgaccgtgataatcaaaccattcaagctggaagacgttcgtgaagcgttatcttccattggtattcagggcctgaccgtcaccgaagtgaaaggtttcgggcgtcagaaagggcatgccgagctgtaccggggggcggaatacagcgtcaacttcctgccaaaagtaaaaattgatgtggcgattgctgatgaccaactcgatgaagtgatcgatatcgtcagtaaggcggcttacaccggaaaaattggcgacggcaaaatcttcgtcgctgaattgcaacgcgtcattcgtattcgtaccggcgaagccgacgaagcggcgctgtaatctctggcacacagcaacaggaacgaaaaatgaagatagcgacgataaaaactgggcttgcttcactggcgatgctgccgggactggtaatggctgcacctgcggtggccgataaagccgacaatgcgtttatgatgatttgtactgcgctggtgctgtttatgactattccggggattgccctgttttacggtgggttgattcgcggcaaaaacgtgctgtcgatgctgacgcaggtgacggtgacgtttgcactggtctgtattctctgggtggtttacggttactcgctggcgtttggtgagggcaacaacttcttcggcaacattaactggctgatgctgaaaaacatcgaactgacggcggtgatgggcagcatttatcagtatatccacgtagcgtttcagggatcgtttgcctgcattaccgtaggcttgatagttggggcgctggcggaacgaatccgcttctcagctgtgttgattttcgtggtggtatggctgacgctctcttacattcctattgcgcatatggtctggggcggtggtttgctggcttctcacggtgcgctggatttcgcgggtggcacagtggtgcacattaacgccgcaatcgccggtctggtgggcgcgtatctgataggaaaacgcgtgggcttcggtaaagaggcgtttaaaccgcacaacctgccgatggtcttcaccggtactgccattctctatattggttggtttggctttaacgccgggtcagcgggcacggcgaatgaaatcgcggcactggcatttgtgaatactgtggtcgcaacggcggcggcaattcttggctggatcttcggtgaatgggcgctgcgtggtaagccttctctgctgggagcgtgttctggcgcgattgccggtctggtcggcgtgacgccagcgtgtggctacattggggttggcggcgcgttgattatcggcgtggtagctggtctggcgggcttgtggggcgttactatgctcaaacgcttgctgcgggtggatgatccctgcgatgtcttcggtgtgcacggcgtttgtggcattgtcggctgtatcatgactgggatttttgccgccagttcgctgggtggcgtgggcttcgctgaaggcgtgacgatgggccatcagttgctggtacagctggaaagcatcgccattacgatcgtctggtccggtgtggtggcatttattggctacaaactggcggatctgacggttggtctgcgtgtaccggaagagcaggagcgagaagggctggatgtcaacagtcacggcgagaatgcctataacgcgtaacaagcactgcaaaaaacagccggacggttttcacctccggctattttttttaattgtgattacgcatcaccccttcctgaacggtcgaggcaaccagtacgccgtcctgggtataaaactcaccgcgcacaaagccacgtgcgctggacgccgaggtgctctccacgctatacagcagccattcattcaaattaaacgggcgatggaaccacatggaatggtcaatggtggcaatctgaatccccggttcgagaaaaccgatgccgtgcggctgtagagctaccggcaggaagttaagatcagaagcgtaaccgagcagatactgatgaacgcgcaggtcatccggcacgctaccatttgcgcggatccacacctgacgatgtggttctgcgacgtgacctttcagtgggttatgaaactccaccggacggacttccagcggacgatcgcagatgaatttatctttaagcactggcggcagcaggtgcgccagcgattgggcgatttgcgtttccgaaggcaggccatcaggcgctggcgcggacggcattgttttttgatgttcgaaacccgcttctggtgcctggaaagaggccgtcatataaaaaatcggtttgccgttttgaatagcagcaacccggcgggcgctgaagctgttaccgtcacgcagcgtttcgacatcataaataatcggtttcttactatcgcctgggcgaagaaagtagctgtgaaacgaatgtaccagccgctcttccgggacggtctcttttgcagcatacaaggcctgacccacgacctggccgccaaacacctggcgtaaacctaaatcttcactctggccgcgaaagagtccttcctcaattttttccagatttaacaatgtcagtaaatttttgagcgcctgactcatataactctccagtaacaaagctgccgcagcaagccaaagtgagttgagtataacgcaaatttgccactggtccgatgggtgcaataatctgaattacgggctaattacaggcagaaatgcgtgatgtgtgccacacttattgacgttactattttgttaaccactcttccggcgaggaaagttagcccgctggtgcattgataataaggagaaatgaatgaaactcgtgcacatggccagtggtttagcggttgcgattgcgttggcggcttgcgcagataaaagcgcggatattcagacgccagccccggctgcaaatacgtctatttcagcaacacaacaacctgctatccagcaaccgaatgtctccggtaccgtctggatccggcagaaagtcgcactgccgcctgatgctgtgctgaccgtgacactttctgacgcgtcgttagccgatgcaccgtcaaaagtgctggcgcagaaagcggtgcgtaccgaaggtaaacagtcaccattcagctttgttctgccatttaatccggcagatgttcagccgaacgcgcgtattctgttgagtgcggcgattaccgtgaatgacaaactggtatttattaccgataccgttcagccggtgatcaacaagggcggaactaaagccgacctgacattggtgccggtgcagcaaaccgccgtgccggttcaggccagcggtggtgcaacgactaccgtaccttcgacttcaccaactcaggtgaatccgtcttcggcagttccagctcctacgcaatattaagcgacgttaaccctctccgcccggagagggttagtagttccagcgataacgctgcaagtcgatttgcccgcttcccgataccatcacaccttctgccagtaatgcctgtcgctgacgctgtaaatccggtccggttagcgaaattgtgccgtggcgattaaccacccggtgccagggtaaggtgctgccttcagggagacgctttaacacaccgcccacctggcgcgcggcgcggggcgatcccgccagtttcgccacatcaccgtaagtggtgacatagccttcgggaatagcggcgacgatttgccagacgcgttggggaaatgaatcttctttttccatcttttcttcctgaggtaatttttcagcataatctggaaaaacgcccgagtgaagtcgcattgcgcaagaaaccagcatctggcacgcgatgggttgcaattagccggggcagcagtgataatgcgcctgcgcgttggttctcaacgctctcaatgggggctctgttggttctcccgcaacgctactctgtttaccaggtcaggtccggaaggaagcagccaaggcagatgacgcgtgtgccgggatgtagctgccagggcccccacccatttctgcctcccaccgtttcgtcaaaaaaaaccaacatggctaaactttaaccacaactgacgtcgcaagaattgtctggctgcgcagtacgcttcggaggtatgtctgatgaagtatgttgatggttttgtggttgccgttcctgccgataaaaaggatgcctatcgggaaatggccgctaaggctgcgccattgtttaaagagtttggcgcgcttcgtattgtcgaatgctgggccagcgatgtaccggatggcaaagtgaccgattttcgtatggcggtgaaagcggaagagaatgaagaggttgtctttagctggattgaatacccttcaaaagaggtccgcgacgctgctaatcaaaagatgatgtcggacccacggatgaaagagttcggcgagtccatgccgtttgacggcaagcgaatgatctatggcggattcgagtcaatcatcgacgaataggtagcgtgacgggctgtgcggcgtgccgtcagcccaaaaattcacaaatgttgctcggcccagcgtaagaaatcttctttcggtaatgccttgctgtagagccagccctgaccgtagtgcacgccatgctggcgtagccactcttcttgtttactggtttcgattccctccgctaccattttcagtttcagtgtttttgccatttcgatgatatgcggcgtgacatttttatattccagcgcatcaacgaaagatttatcgatcttcagaatgtcgacatccagatcctgtaaataacttaaacttgaatatcccgtaccaaaatcatcaagataaatttcatggcccgcctcccggtagcgagaaattatcggggcgctggttttcggatcggcaaactcgcgttcagtgagttcaagcgcgatctgtctgggattaacctgatagtgattgatcatttcacgcagcaattgcgggattttttccgaggtgagcacggtggattcaagattgatcgaaatatgctgctgtggatgctgacgcagccagtcgcccatatcttcaaagacgcttcttataatcagtagcgtcaatggctcagaaaggcccgtttgctgtgccagcggaataaaactatctggtgacaaccaactaccgtctgtctgcggccagcgcgccagtgcctcagcaccgacaattttgccattggctaaggagacaatcggctgatagtgcacgcaaatatcacgattttcgatagcatcctgcagccgatgatgcggtgactggatacggcgcaaaatacgcagcacaaacatcgctgccagcaggccaatcaccaacccgagcggtaaccaaataaagacttgccgatgccagcctttctgcaacattttcgttgaagcccaggtgatgatcgaaatattcatctccgggaagggcaggatatcgtaaatgattccattattttcgatatgctcaccgggtgttttttgtagcctggtaataattccctgagcaatttcatcgctgctggttatgacaacgttatgggcattgccaataatggcggcatcaatttgccatgagctatagggaatgacatcaataaaggaagcggggtcgatcatgacgacataatgtgccgttcccatggcgaccatgtaacggataatgcctaaatcgttatgcgatgttaaccagacacgataaccatctttcgaaattttacctggctcggggaaggtatcgggcggactttcatgctccagagacgaacactggggaacgttgttatcgatataaaccacttcctgaatatagcgataactgtaagatacccgacgcatttccatgagatgggcttcgctacaggcagcgccttgccatctttccagctcttgcagcgcatctttcccttgtgtcgccaccttattggcccgaatagcgacgcgggaggaataggtatccagctcttcaataaacgatgtttctacctgctgatgggccagccagatgcttaagccgacaggcagcaatactgaaagaatcagtactcccgaaataaggccgaccagatgtcgtgttctcaccagcatatccttattaacacagtgtagggaaagtatatctgattgtggaaaaaggctggcaggagataaggaggtagagctggtatttcatgaagtgatgggtggaaacgatcattgtcatttgaccaggcgcagagctttacgcctggtatgtaaccctaacttaagatgttgattcggcgcgagcgagggtaaaaatatcgtaaaaagacagttcacctttacggacgatcattttttgcagttgttccttatgaacatccgcgacacgcggagagttcaagatggcttcaaccagcgcggcaggtacaaagcgcgtgttgtaccattcgccgttatagcaaacgcggaaatccagcacgtcgatatcttcatagcggtagcgtgggtagacatcgaaaaagaagaaaccattaagcaggataaataatacaaccagtagccagacagagcctgacagcgtttcggactgcaacatcaccgccagggtggcaaaaaaagcaacgtacataccgataaacagccccggatgtttacggataaaactgatactaaagcggggtttgttgtcgcgtttttcgcgggtattcagagactcaatcgtttcggtcagcaggcgttgtatttcggtcatcgtttgccttcgtggtatctgcaactttccagggaacaccctattttaacgtgggaatagtagaggggaagtaacagatttaccacaattttgcataacagttgcgaaaaaccgattacaattttttaattattctggctggattaccgcccacgacaacgttgtccgggacatcttttgtgacaactgcacctgaggctaccacgacgttatcaccaatggtcacaccagggttaatgaccgcgcgtccgccaatccagacgttattaccgatggtgacgggtttccccagttcagcaccgctattacgtgctacagggtcgatgggatgtgttgccgtgtagatatgaacgcctggtgccaacatacagttatcaccgatgcgaatagggcagacatcaagcatcacgcaatcgaagttggcgaaaaattattaccgagaaaaatgttatagccatagtcacagcgaaacgttggctcaatataagcctctgtcacctgaccgaatagatcagcgagaatttgctggcgtaatgtgtgctcttccgccagggaatgattgtatcggtgaataagctgacgagcgcgcaggcgatcgcgagataacgtctcatctgccgagcgatacaactcaccagcaatcatcttttctttttctgtgctcattactgacctccggttgctgaaaatgcggcaacacagtaagacgaaaagtcagtgaagagaacgttcccattacatctgtgtgataaagatcacatagggtatgtcttcatggtgaaaagtataaaattcttaataaacagccggttatagctccgaaagcgaattatttattagcgaataaatttccatactgaggaagggatcttgtcgtatagtttattcatggtcaattcggcgaggcggtgatctgcggctgagtaaaataccgccagttcattatctgataattcgtatttatttttctcgataacacgctccagcgtgtcaattgtctggcaacgacgtaaacgcattaaataatcggttttcgttaaaggtttttcggacatacttctacccatggttgtaataattctaacaagataaactcgcaggattctctttcgtcgcattgacaaaacaacggaatagtcgattacctgacttccgccatttctgaagatcctgcatattaataccataactactgaacaacataaaggtgtcatccagatattcgtcgatctgctcaatgagcttattgtcttcattatacttaattttgtaattaagtgcgaaggtcgcaatatgctcaatcagttcattcaactggaggttgatcgccgaggttgggtcgttaacccagccatgattgctttcttcaaggtttgcaaggcagtcatgatacagggtttcacagagaaacttaagctgtgcgatatcatgtcttttgggtgagtattcatccataacgcgtccccttcttagcggttgaactaacggacacctttcgggatggaaaaaacttactgacctggacttgccctctcgtttgttagcttaactataagccactctttgcaggttttcatcgcattattacgaaaaattacaattaggaaggaatcgggacaggactcactttttcatactagcactaacccgcagcaggtaaaagcagtttgctcgaactgttcataacatttcaggattatcgccagatgaaattggtgacactaataccaggattgctctgaatatgacgtaataaccgaggaatgaataaagaattaccgcaaataattaagaatagcctctaaatgattatggattattaaatctattagcgctacttaatataaattaactaacaatcagtattttttatgaattttatccgtggttaatactggttttcgtatgagatcctgagttggtggttcaattactccttaatgttcgtaggttatgcataaaaaaggccgcttgcgcggccttagtgattacacgttgtatcaatgatgatcgacagtatggctgtgctcgatatcttcattcttgcggctaaagcggcggcgaaccaccacaaagaataccggaacgaagaagattgccagtaccgttgcggtcaccatcccgcccattacaccggtacctactgcgttctgcgcgccggaaccagcaccagtactgataaccagcggcataacgccgaggataaacgccagcgaggtcatcaggatcggacgtaaacgcatccgcactgcatcaagcgtcgcttcaatcagacctttaccttctttatccatcaagtctttggcgaattcgacgataagtatcgcgttcttcgccgacaacccaatggttgtgagcaggcctacctggaagtaaacgtcattggtcaggccacggaaggtggcagccagcaacgcaccgataacccccagcggaacgaccagcataacggagaacggaatcgaccagctctcgtacagcgccgccagacacaggaatacgacaatcaacgaaatcgcgtacagtgaaggtgcctggttgccggagaggcgttcctgataggacatccccgtccagtcatagccaacaccggtaggcagtttgctcgccagttgttccatcagctccattgcttcaccggtacttttacccggtgccgcctggcctaagatttccatagatggcaggccgttgtaacgttccagacgcggcgaaccgtactcccaacgagaagaggagaacgccgagaacggcaccatctgaccatcagcagcacgaacataccagtcgccgatatcatccggcagcatacggtatttcgcttctgacatgacgtaaactttcttcacacgaccgcggtcgataaagtcgttcacatagctaccaccccatgcagcgcccagagtggtgttaatgtcgttgatagaaacacccagcgcctgcgctttttcctggtcgatatcaatcttaaactgcggggtatcttccagaccgtttggacgtacgctggtcaacatatcagggtgcttcgctgcttctgcaagcagctggttacgcgcctgagtcagtttttcgtgaccaaggccagcctggtcaatcagctcaaagtcaaagccggttgcagtacccagttccacgattgcgggcaggttaaaggcgaaaaccatcgcatctttgatttgcgagaaagcgcgtgttgcacgcatagtaatcgcttcaactttgttttcttcgcccggacgatcggcccagtccttcaaggaaacgaacgcaataccggtattctgaccacgtcccgcaaagccgaagccgttaacggcgaacaccgactcaacgttgttcttttctttggtcagatagtaatgcgttacctcattgagcactttctgcgtacgttcctgcgttgcacctgctggcagctgaaccatggtcataaatacgccctggtcctcatctggcaagaaggagcttggcagacgcacgaacagataggccatgccgaccacgatgatcagatacagcaccaggtaacgccccgtactgcgcagaataccgcctacgctgtcggtgtagtggtgcgtgctcttctcgaacatgcggttaaaccagccgaagaagccttttttaccttccccgtgatcgcctttggcaatcggtttcagcatggtggcacaaagagccggagtcaggatcaacgctaccagtaccgacagcgccattgctgaaacaatggtaatagagaactgacgatagatagcaccagtagaaccgccaaagaaggccatcggtacgaataccgccgacagtaccatcgcgataccgaccagagcgccctgaatctgccccatcgacttacgggtagcttcttttggcggcaaaccttcttccgccataacacgctcaacgttttctaccacaacgatagcgtcatccaccaacaagccgatggcgagcaccatcccgaacattgttagcgtgtttatcgagaagccaaaggcggcaaggacggcaaaggtcccgagcaataccaccggtacggcaatggtcggaatcaacgtcgcgcggaagttctgcaggaacagatacatcaccaggaacacgaggatgatcgcttcgaccagcgttttaaccacttcgtgaatagagattttcacgaacggcgtggtgtcgtacgggtaaacaattttcagacctgacgggaagaacggttccatcttcgccagttcagcacggattgccgcagcggtatccagcgcgtttgcaccggtcgccagcttgatccccagaccggaagccggttggccgttaaactctgcgatgatgtcgtagttctcaccacccagctcaatcttcgccacatcacgcagcagtacgcgggaaccatcctgattcactttcagcaggattttgccgaactcttcagtagaggtcagacgcgtctgagcaataatagaggcgttaagctgttggcctttcaccggcggcgtaccaccgagctgacccgccgcaacctgggcgttctgcgctttgatggcggtaatgacatcaaccggcgttagctggaatttgttcagctcattcgggttcatccagatacgcatcgcgtactgtgaaccgaacaactgaacatcacccacgcccgacgtacggctgatggcatctttcatattcgccgctacgtagtcagagatatcctcctgcgtcatggtgccatcggtgttgataacgccgacaaccatcaggaagctgctggatgatttctcaacgctcaccccttgctgctgaacttcttgcggcagcaacggcatcgccagctgcagtttgttctgcacctgaacctgcgcgatatccgcatcagtaccagactcaaaggtcagggtgatctgcacggtacccgtggagtcactgttagaggacatgtacatcaggttatcgataccgttcatattctgttcgataacctgtgtcaccgtgtcctgcactgttttcgcatcagcgccggggtaggaggcggagatcgttactgccggcggtgcaatcgtaggatattgcgccaccggcagtttgaggatcgccagcccccctgccaacatgatgataatggcgatcacccacgcaaaaatcgggcgatcgataaagaaattaggcatgtcttaacggctcctgtttaagttaagacttggactgttcaggctgagcaccgcttgcggcttgctggttattatcagcggtaacttcttgtgcttttacctggacaccaggacgcactttctgcagcccacttattactacgcgatcgcctgctttcagaccttctgtcaccagccacttatcgccaatagcctggcttgcaacgatcggacgggtctccactttgtcatccgcgccaactaccagtacggtggcatcgccacgcggcgtacgggttacgccctgttgcgggactaaaatagcgtttggattaagcccttcttcaagacgtgcgcgcacgaacatacccggcagcagagtgtgatccgggttcgggaagatagcgcgtagggtgatagacccagtggtctgatcaacggtaacgtcagagaattccagcgtaccgtcctgcgggaacttaatgccgtcactggtgatcagcgacactttggctttgccgttctcttgtttcagcgtgccattcgccagttcctgtttcaggcgcaggaagtcgttgctggactgggtcacatcaacgtagatcggatcaagttgctgcacggttgccagcgcagtcgcctgaccgttctgtaccaatgcgccttccgtcacgttcgacttaccaatgcgaccgctaatcggagaggtgactttggtgtaagccagattgatccgcgcagtttcaacggcagctttcgccgcagttaccgcagcattcgcctgttgcgcatcagccagagcctgatcgtactcttgcttactgatgtactgagtaccgagcagtttctgataacgattcaccgtcaattgcgcgatattggctgcagcctgggctttcgccagatcacctttcgcactgtcgtatgtcgcctgataggtcgcaggatcaatctgatagagagagacacctgcttcgatgtcgctaccttctttgaaattacgcttcaggataatcccgctaacttgaggacgaacttctgcgatccggtaggcactggtgcgacccggaagctcggttgtgatctgcagaggttcagttttgactgttactacgccaacggcgggcatctgctggccactttgttgggcctgtttgtcgtcacatcctgttagggctaagctgcctgagagcatcagaacgaccgccagaggcgtaaaccctctgtttttgttcatatgtaaacctcgagtgtccgatttcaaattggtcaatggtcaaaagttaataaacccattgctgcgtttatattatcgtcgtgctatggtacatacattcacaaatgtatgtaaatctaacgcctgtaaattcacgaacatatggcacgaaaaaccaaacaagaagcgcaagaaacgcgccaacacatcctcgatgtggctctacgtcttttctcacagcagggggtatcatccacctcgctgggcgagattgcaaaagcagctggcgttacgcgcggtgcaatctactggcattttaaagacaagtcggatttgttcagtgagatctgggaactgtcagaatccaatattggtgaactagagcttgagtatcaggcaaaattccctggcgatccactctcagtattaagagagatattaattcatgttcttgaatccacggtgacagaagaacgacgtcgattattgatggagattatattccacaaatgcgaatttgtcggagaaatggctgttgtgcaacaggcacaacgtaatctctgtctggaaagttatgaccgtatagaacaaacgttaaaacattgtattgaagcgaaaatgttgcctgcggatttaatgacgcgtcgggcagcaattattatgcgcggctatatttccggcctgatggaaaactggctctttgccccgcaatcttttgatcttaaaaaagaagcccgcgattacgtcgccatcttactggagatgtatctcctgtgccccacgcttcgtaatcctgccactaacgaataaccctgaatctgactccaggatttttcctggacattttcgtcgttgctattctggttcactgcgtcgtgatattcttgcggtttgactttttcaggtcgttcttcaggttcagaaaccttcattcatcatgactatgttccagtattacaaacgatcacggcattttgttttttcagcatttattgcttttgtttttgtcttgttatgccagaacacggcgtttgcgcgggcgtcatcgaatggtgatctgccgacaaaagcggacctgcaggcgcaacttgactcactaaataaacaaaaagatctttctgctcaggacaaactggtgcagcaggatctgacagatacattagccaccctcgataaaatcgatcgcataaaagaagagacagttcagctacggcaaaaagtcgctgaagcgccggaaaaaatgcgccaggcgaccgcggcgttaacagcacttagcgatgtcgataacgacgaagaaacgcgcaaaattctgagtacgctttcgttgcgccagctggaaactcgcgttgcccaggcgctggacgatttgcaaaacgcacaaaacgatctggcgtcttataacagccagctggtttcgttacagacgcagcccgaacgcgtgcaaaatgcgatgtataacgcttcgcagcagctgcaacaaattcgcagtcgtctggatgggactgatgtcggcgagactgccttacgtcccagccagaaagtgttaatgcaggctcagcaggcgttgctgaatgcggagattgaccagcagcgtaaaagcctggaagggaacaccgtcttgcaggataccttgcaaaagcaacgtgattacgtgacggcgaacagcgcccgtctggagcaccagttgcagctgttgcaagaagcggtaaacagcaagcgcctgactttaactgaaaaaacggcgcaggaagccgtctccccggatgaagccgcgcgtattcaggctaatccgctggtgaaacaggaactggaaattaaccagcagttaagtcagcgtctgattaccgcgactgaaaacggtaatcagttgatgcagcaaaacattaaagtcaaaaactggctggagcgggcgctgcaatcggaacgcaatattaaagagcagattgccgtcctgaagggcagcctgctgttgtctcgtatcctttaccagcaacaacaaacgctgccctcggcggatgaactggaaaacatgaccaaccgcatcgcggatttgcgtctcgaacagtttgaagttaaccagcagcgtgatgcacttttccagagcgatgcgttcgtcaacaaactggaagaaggtcacaccaacgaagtcaacagcgaagttcacgatgcgttattgcaagtggttgatatgcgtcgcgaattgctggatcaactcaacaaacagttgggtaaccagctgatgatggccattaacctgcaaatcaaccagcagcagttaatgagtgtgtcgaaaaacctgaaatccatcctgactcagcaaatcttttgggtgaacagtaaccgtccaatggactgggactggatcaaagcgttcccgcaaagcctgaaagatgaatttaagtcgatgaaaatcacggtgaactggcaaaaagcctggcctgccgtttttatcgctttcctcgccggtttgccgctgctgttgattgccgggctgatccactggcgtctgggctggctgaaagcgtatcaacagaaactggcttccgctgtgggttccctgcgtaacgatagccagctcaacacaccaaaagcgatccttatcgacctgatccgcgcgctgccggtgtgcctgattattctcgcggttggcctgattctgttgaccatgcagctcaacatcagcgaactgctatggtcgttcagtaaaaaactggcgattttctggctggtgtttggcctgtgctggaaggtactggagaaaaatggcgttgccgtgcgtcacttcggcatgccggagcagcagaccagccactggcgtcggcaaattgtccgcatcagtctcgcgttgctgcctatccatttctggtctgtggtggcagaactttccccgctgcatctgatggatgatgtgctggggcaggcgatgattttcttcaacctgctgctgattgccttcctggtatggccaatgtgccgcgaaagctggcgtgataaagagtcgcacaccatgcgactggtcaccattaccgtgctgtcgattatcccgattgcattgatggtgctgactgccacgggttatttctacaccacgctgcgcctctccgggcgttggattgaaaccgtttatctggtgatcatctggaacttgctctaccagacggtattgcgcggcttaagcgtagcggcgcggcgtatcgcctggcgtcgtgcgctggcgcgtcggcagaatctggtgaaagagggcgcagaaggtgccgaaccgccggaagaacccaccattgcactggaacaggttaaccagcagacgctgcgtattaccatgttgctgatgtttgcgctgttcggtgtcatgttctgggcaatttggtccgatttgatcaccgtgttcagctatctcgacagcatcacgctctggcattacaacggcactgaagctggcgctgcggtggtgaaaacgtcaccatgggcagtctgttgtttgcgattatcgcctcaatggtggcctgggcgttgattcgcaacctgcctggtttactggaagtgctggtgctctcgcgactgaatatgcgtcagggcgcgtcgtatgccattactaccatccttaactacatcattattgccgttggtgcgatgacggtgttcggatcgctgggcgtctcgtgggataaactccagtggctggcggcagcattatccgtaggtcttggttttggcttacaggagatcttcggtaactttgtctctggtttgatcatcctgttcgaacgtccggtgcgtattggtgatacggtaaccattggtagcttctcggggacggtaagtaagatccgtattcgtgcgacaacgattaccgatttcgatcgcaaagaagtgatcatcccgaacaaagcgtttgttaccgagcgtctgatcaactggtcgttgactgacactactacgcgtctggtgatccgtctcggcgtggcctatggctccgatctggaaaaagtgcgtaaagtgttactgaaggcggcgactgagcacccaagggtgatgcacgaaccaatgccggaagtcttctttacggcatttggtgccagcacgttggatcatgagctgcgtctgtatgtgcgtgaactgcgtgaccgtagtcgtactgtcgatgagctgaaccgtactatcgatcagctgtgccgtgaaaacgacatcaacattgcctttaaccagcttgaagtgcatctgcacaacgagaagggcgatgaggtgacggaagtcaaacgcgactacaaaggcgatgacccgacgccagcggtagggtaataaccaaagggggcgacatttagttgccccgagattactgacaaagtgcgcgttgttcatgccggatgcggcgtgaccgccttatccggcctacgaaaccgcaagaattcaatgtattgcaggagcggtgtaggcctgataagcgtagcgcatcaggcagttttgcgtttgcccacaatcttaggggacatttagcggccccatttatttctcacttttccgcctcatcatcgcgcgttaatttcttttcataatcgcgttttacaatatccagcgcgcgcagcacggtgcgggctgggatctgattttcttccagcagcacaatcaaatcgacagccagtttgacatcgtcaggggcattttccagtgacatactctctccattgctagcgggttaaacgcgctaacctgttttcgattttttccagcgcatggcggcagcgtgccaggcgcgcttcataggcttccacttcacgatgcagcgtttgctgttccacgagatcggtcacccgcgccagacgggctctgcgttcggcaaccatctcacgtagccgccgctcaaaatcctgatgctgaatacgtttacgctgccagcgggcaattttcggtggcgcactgtcccactcgcgcaatgaccaggcggaggcttcacgcgcgatggcttccagttgtgccgccagatgttccgccagccaggccacttgcggcagctgttgctgctcaactgcatgacgaagcgcagccagattatcgcccgcctcgtcgagacaagcctgtagtgttgtcgcacgagtctgaaaaagatgcctgtcgaaacgagcacttagcgtggcgaactgtgacaccggggcacaacgctgacgcagcgtagcgagctgtccttccagtttttccagcagcagggcggttttcacgataagacctcaatgaaaatgataattgttatgctaaagtagccactctgtaagctgacaacactcaatatgcaacgaatcattttaatcatcattggctggctggcggtagtgctgggtacgctgggcgtggtattaccggtattaccgacgacgccgtttatcctgctggcggcctggtgctttgcccgttcttccccgcgctttcacgcctggttgctgtaccgctcatggtttggcagctatctacgtttctggcagaaacatcatgcgatgccgcgcggcgtcaaaccgcgggcgattttgcttattttgctcacgtttgccatttctctgtggttcgtccagatgccatgggtgcgcatcatgttgctggtaattctcgcctgtttgcttttctatatgtggcgaattccggtgattgatgaaaagcaagaaaagcactgaagcacaacaatcgcagttgcaattattgcgtacagccagtacattctggcgttttcgagcacaggcgcaggcggtcaaaggttaaacaactgttacttttgatacgtttaaaacgcgccgtgagtaccaccgtaacaagcaggcatacacttatgaccgcgactgcacagcagcttgagtatctcaaaaatagcatcaaaagcattcaggactacccaaaacccggcattcttttccgcgatgtcaccagcttactggaagacccgaaagcttacgctctcagcatcgacttgctggttgagcgttacaaaaatgcgggcattaccaaagttgtcggcaccgaagcgcgtggcttcttatttggcgctcccgtagctctgggtctgggcgttggctttgtaccggtccgtaaaccgggcaaactgccgcgtgaaaccatcagtgaaacttacgacctggaatacggcaccgatcagctggagatccacgttgatgccatcaaaccgggcgacaaagttctggtggtggacgatctgctggcaaccggcggcactatcgaagcgaccgttaaactgatccgtcgtctgggtggtgaagtggctgacgctgcgttcattatcaacctgttcgatctcggcggcgaacagcgtctcgaaaaacagggcattaccagctacagccttgtcccgttcccgggccattaattatcgccagtcttgtgctgcccacgctacggacagcacaagatgtgcattcagcctcgccgttctgacggggctgtgttagcattaccccttcgtgaatccaccttccagcgtttcagagcctgccaatgagttatcaggtcttagcccgaaaatggcgcccacaaacctttgctgacgtcgtcggccaggaacatgtgctgaccgcactggcgaacggcttgtcgttagggcgtattcatcatgcttatcttttttccggtacccgtggcgtcggaaaaacctctatcgcccgactgctggcgaaggggctaaactgcgaaaccggcattaccgcgacgccgtgcggcgtgtgcgataactgtcgtgaaatcgagcaggggcgctttgtcgatctgattgaaatcgacgccgcctcgcgcaccaaagttgaagatacccgcgacctgctggataacgtccagtacgctccggcgcgtggtcgtttcaaagtttatctgatcgacgaagtgcatatgctgtcgcgccacagctttaacgcactgttaaaaacccttgaagagccgccggagcacgttaagtttctgctggcgacgaccgatccacagaaattgccggtgacgattttgtcgcgctgtttgcaatttcatctcaaggcgctggatgtcgagcaaattcgccatcaacttgagcacatcctcaacgaagaacatatcgctcacgagccgcgggcgttgcaattgctggcgcgcgccgctgaaggcagcctgcgagatgccttaagtctgaccgaccaggcgattgccagcggtgacggccaggtttcaacccaggcagtcagtgcgatgctgggtacgcttgacgacgatcaggcgctgtcgctggttgaagcgatggtcgaggccaacggcgagcgcgtaatggcgctgattaatgaagccgctgcccgtggtatcgagtgggaagcgttgctggtggaaatgctcggcctgttgcatcgtattgcgatggtacaactttcgcctgctgcacttggcaacgacatggccgccattgagctgcggatgcgtgaactggcgcgcaccataccgccgacggatattcagctttactatcagacgctgttgattggtcgcaaagaattaccgtatgcgccggaccgccgcatgggcgttgagatgacgctgctgcgcgcgctggcgttccatccacgtatgcctctgcctgagccagaagtgccacgccagtcctttgcgcccgtcgcgccaacggcagtaatgacgccaacccaggtgccgccgcaaccgcaatcagcgccgcagcaggcaccgactgtaccgctcccggaaaccaccagccaggtgctggcggcgcgccagcagttgcagcgcgtgcagggagcaaccaaagcaaaaaagagtgaaccggcagccgctacccgcgcgcggccggtgaataacgctgcgctggaaagactggcttcggtcaccgatcgcgttcaggcgcgtccggtgccatcggcgctggaaaaagcgccagccaaaaaagaagcgtatcgctggaaggctaccactccagtgatgcagcaaaaagaagtggtcgccacgccgaaggcgctgaaaaaagcgctggaacatgaaaaaacgccggaactggcggcgaagctggcggcagaagccattgagcgcgacgcgtgggcggcacaggtgagtcaactttcgctaccaaaactggtcgaacaggtggccttaaatgcctggaaagaggagagcgacaacgcagtatgtctgcatttgcgctcctctcagcggcatttgaacaaccgcggtgcacagcaaaaactggctgaagcgttgagcacgttaaaaggttcaacggttgaactgactatcgttgaagatgataatcccgcggtgcgtacgccgctggagtggcgtcaggcgatatacgaagaaaaacttgcgcaggcgcgcgagtccattattgcggataataatattcagaccctgcgtcggttcttcgatgcggagctggatgaagaaagtatccgccccatttgatcgtaagcacagcttacgttcgtcatccttaacgtgattgagagagaaacctatgtttggtaaaggcggtctgggtaacctgatgaagcaagcccagcagatgcaagaaaaaatgcagaaaatgcaggaagagatcgcgcagctggaagtcaccggcgaatctggcgcaggtctggtaaaagtgaccatcaacggtgcacacaactgccgtcgcgtagagatcgacccgagcctgctggaagacgacaaagagatgctggaagacctggtggctgcagcattcaacgacgcagcacgtcgtattgaagaaacgcagaaagaaaaaatggcctctgtatcctccggaatgcagctgccgcctggctttaagatgccgttctgatgcaaaccagcccgctgttaacacagcttatggaagcactgcgctgtctgccgggcgttggcccgaagtcggcgcagcgtatggcgttcacgctgcttcagcgcgatcgtagcggcgggatgcgtctggcgcaggcgctcacccgggcgatgtcggaaatcggccactgcgccgattgccgcactttcaccgaacaggaagtctgtaacatctgttcgaatccgcgtcgtcaggaaaacggtcaaatctgtgtggtggagagtccggcggacatttacgccattgagcagacggggcagttttcaggtcgttattttgtgttgatggggcacctgtcaccgctggacggcatcggtccggatgatatcgggcttgatcgtctggaacagcgtctggcagaggaaaaatcactgaagtgatcctcgccaccaatcccacggttgaaggtgaagctaccgctaactacattgccgagctttgcgcgcaatatgacgtggaagccagccgaatcgctcatggcgtaccggttggcggcgaactggaaatggtcgatggcaccacgctgtcacactcccttgccgggcgtcataagattcgtttttaagcaaacgagagcaggntcacctgctctcgcttgaaattattctcccttgtccccatctctccctcatcctgtttttaaccttaaaatggcattattgaggtagacctacatgaaaggacaagaaactcgtggttttcagtcagaagtgaaacagcttctgcacctgatgatccattctctctattccaataaagaaatcttcctgcgtgagcttatctctaacgcctccgatgcggcggacaagctgcgtttccgtgcgctatctaacccggacctgtacgaaggtgatggcgaactgcgcgttcgtgtctctttcgataaagacaagcgcacgctgaccatctccgataacggcgtggggatgacccgcgacgaagtgattgaccatctggggactatcgctaaatccggtaccaaatcattcctcgaatccctgggttctgaccaggcgaaagacagccagctgatcggtcagttcggtgttggtttctactctgcgtttatcgtggccgacaaagtgaccgtgcgtactcgcgcggcaggcgaaaaaccagaaaatggcgtgttctgggaatcggctggcgaaggtgaatacaccgttgccgacatcaccaaagaagatcgtggtactgaaatcaccctgcatctgcgtgaaggcgaagacgagttcctcgatgactggcgcgtgcgttccatcattagcaaatactccgaccatatcgcgctgccggtagagatcgaaaaacgcgaagagaaagacggcgaaaccgttatctcctgggaaaaaatcaacaaagcgcaggcgctgtggactcgtaacaagtcggaaatcaccgatgaagagtacaaagagttctacaaacacatcgcccacgactttaacgatccgctgacctggagccacaaccgtgttgaaggtaagcaggagtacaccagcctgctgtacattccgtcccaggctccgtgggatatgtggaaccgcgatcataaacacggcctgaaactgtacgtccagcgtgtgttcatcatggacgacgcagaacagttcatgccgaactatctgcgcttcgtgcgtggtctgattgactccagcgatctgccgctgaacgtttcccgtgaaatcctccaggacagcacggtaacgcgtaacctgcgcaatgcgctgaccaagcgtgtgctgcaaatgctggaaaaactggcgaaagacgacgcggaaaaataccagaccttctggcaacagtttggcctggtactgaaagaaggtccggcggaagatttcgctaaccaggaagcgatcgccaaactgctgcgttttgcttctactcataccgattcttctgcgcagaccgtgtctctggaagactacgtttcccgcatgaaagaagggcaggagaaaatctactacatcactgcagacagctatgcggcagcgaagagcagcccgcacctggaactgctgcgtaagaaaggcatcgaagttctgctgctttccgaccgcatcgatgagtggatgatgaactatctgactgagttcgacggtaaaccgttccagtcggtgtctaaagttgacgagtcgctggaaaaactggctgacgaagttgatgagagcgcgaaagaagcggagaaagcactgactccgttcatcgaccgtgtgaaagccctgctcggcgagcgcgtgaaagatgtccgtctgactcaccgtctgaccgatacgccagcgatcgtttcgaccgacgcggacgaaatgagcactcagatggcgaaactgttcgctgcggcgggccagaaagtgccagaagtgaaatacatcttcgaactgaacccggatcacgtactggtgaaacgtgcggcagatactgaagatgaagccaagttcagcgagtgggtagaactgctgctggatcaggcgctgctggcagaacgcggcacgctggaagatccgaacctgtttattcgtcgtatgaaccagctgctggtttcctgatgtcatgccggatgacctttgtgtcatccggcatttttcttttcattatctgcactttccgcaaattatctcgccattaaccgtttcagcccctggtgcctttcttgaggcaatcgcctgatggtggtatcgtttatcgctttttcaaaaaattcgacacattttaaggggattttcgcaatgcgtatcattctgcttggcgctccgggcgcggggaaagggactcaggctcagttcatcatggagaaatatggtattccgcaaatctccactggcgatatgctgcgtgctgcggtcaaatctggctccgagctgggtaaacaagcaaaagacattatggatgctggcaaactggtcaccgacgaactggtgatcgcgctggttaaagagcgcattgctcaggaagactgccgtaatggtttcctgttggacggcttcccgcgtaccattccgcaggcagacgcgatgaaagaagcgggcatcaatgttgattacgttctggaattcgacgtaccggacgaactgattgttgatcgtatcgtaggccgccgcgttcatgcgccgtctggtcgtgtttatcacgttaaattcaatccgccgaaagtagaaggcaaagacgacgttaccggtgaagaactgactacccgtaaagacgatcaggaagaaaccgtgcgtaaacgtctggttgaataccatcagatgactgcaccgctgatcggctactactccaaagaagcggaagcgggtaacaccaaatacgcgaaagttgacggcaccaagccggttgctgaagttcgcgctgatctggaaaaaatcctcggctaattcgaaagcgcgcacggacagtcccctcgccccctcggggagagggttagggtgaggggaacaggcccgcacaagcaaacttatcagcaatctcaggccggatattcattcggccttttacaaaaacctcaatctgcgctattcctttttctgatttgacctctcacagcaattagttcttcttcctcacttttccgctacaattatcaacaagttgaatcgataagaggcggtaatgcgtcagactaaaaccggtatcctgctggcaaacctgggtacgcccgatgcccccacacctgaagcggtaaaacgctatctgaaacaatttttaagcgacagacgcgtggttgatacctcacggttgttatggtggccgttgctgcgcggcgtgattttgccgctgcgctcgccgcgtgtggcgaagctgtacgcctcggtctggatggaagacggctcgccgctgatggtttacagccgccagcaacagcaggcgttggcacaacgtttaccggatacgcccgtagcgctgggcatgagctacggctcgccatcactggaaagcgccgtcgatgaactcctggcagagcatgtagatcatattgtggtgctgccgctttatccgcaattctcctgttctacggtcggtgcggtatgggatgaactggcacgcattctggcgcgcaaacgtagcattccggggatatcgtttattcgtgattacgccgataaccacgattacattaatgcactggcgaacagcgtacgcgcttcttttgccaaacatggcgaaccggatctgctgctgctctcttatcatggcattcctcagcgttatgcagatgaaggcgatgattacccgcaacgttgccgcacaacgactcgcgaactggcttccgcactggggatggcaccggaaaaagtgatgatgacctttcagtcgcgctttggccgggaaccctggctgatgccttataccgacgaaacgctgaaaatgctcggagaaaaaggcgtaggtcatattcaggtgatgtgcccgggctttgctgcggattgtctggagacgctggaagagattgccgagcaaaaccgtgaggtcttcctcggtgccggcgggaaaaaatatgaatatattccggcgcttaatgccacgccggaacatatcgaaatgatggccaatcttgttgccgcgtatcgctaaagctgagcggtaaagaactgagcgccgtcgcgaagagcctcgtcggcggttttcatcatccgtgaataatgcaaaaaggcatgcagcgtacctgggtagagtttgaactcacagggctgctgatgcgccgctaacgtctggtaaagcagacggctgtcatccagcagcggatcgaactccgccccggcaataaaacagggcggaacttcgcgagtgagatcattattaaacagacagtaatacggtgactcgcggtccgcgtcgttgcttaaatacgcctcttcatacatctgcaaatcctgttgcgttaagccatcccagacaccgcccaacagacgacgagtcacggaatcccgtaatccgtaaagcccataccacagcaaaacacccgcaattttaccgcaatcgatctgtttatcacgcaaccacaacgcactggcgagcgccagcatggcacctgcggaatcaccggcaaagccaatgcgggacatattgatttgataatcctccgcctgctggtggaaataacaacaagcagccacaatttcctctatcgcttgcggaaaacgcgcttcaggtgaaagggggtaatcaataccaatcaccgtacattggctgtagcttgccagcaggcgcatgatgcgatcgtgggtatcgagattgccgagaataaaaccgcctccatgcaaataaaatagcgtcgccgggctatctggctgcggacaaaagagacgtgtttccacctgcccatattttgttggaaccatgtaagctctggttgccatttctggagcgcccgcattccagaatcggcgctcaagcgtgtaatactgtcgttgctcagcaatcgttcccgttgcgggccaggacggtaaatccggctgaagagtattcacaacggtcttcatttcagcagaaataaggtccagaacaggtagtttgttttccggcttcatacaaaaactcctttcaaattacgtcattgtaaggaaccactgccatgaaaatgcgatcccgcctgctgatattgaaactggctgcgtctcgcgcgctcccgtcagattgtgttaacattcgccgctcagttaaccacccgtaaaaacaaccatgaaatttcccggtaaacgtaaatccaaacattacttccctgtaaatgcacgcgatccgctgcttcagcaattccagccagaaaacgaaaccagcgccgcctgggtcgtaggtattgaccagacgctggtcgatattgaagcgaaagtggatgatgaattcattgagcgttatggattaagcgccgggcattcactggtgattgaggatgacgtagccgaagcgctttatcaggagctaaaacagaaaaacctgattacccatcagtttgcgggtggcaccattggtaacaccatgcacaactactcggtgctcgcggacgaccgttcggtgctgctgggcgtcatgtgcagcaatattgaaattggcagttatgcctatcgttacctgtgtaacacttccagccgtaccgatcttaactatctacaaggcgtggatggcccgattggtcgttgctttacgctgattggcgagtccggggaacgtacctttgctatcagtccaggccacatgaaccagctgcgggctgaaagcattccggaagatgtgattgccggagcctcggcactggttctcacctcttatctggtgcgttgcaaaccgggtgaacccatgccggaagcaaccatgaaagccattgagtacgcgaagaaatataacgtaccggtggtgctgacgctgggcaccaagtttgtcattgccgagaatccgcagtggtggcagcaattcctcaaagaccacgtttctatccttgcgatgaacgaagatgaagccgaagcgttgaccggagaaagcgatccgttgttggcatctgacaaggcgctggactgggtagatctggtgctgtgcaccgccgggccaatcggcttgtatatggcgggctttaccgaagacgaagcgaaacgtaaaacccagcatccgctgctgccgggcgctatagcggaattcaaccagtatgagtttagccgcgccatgcgccacaaggattgccagaatccgctgcgtgtatattcgcacattgcgccgtacatgggcgggccggaaaaaatcatgaacactaatggagcgggggatggcgcattggcagcgttgctgcatgacattaccgccaacagctaccatcgtagcaacgtaccaaactccagcaaacataaattcacctggttaacttattcatcgttagcgcaggtgtgtaaatatgctaaccgtgtgagctatcaggtactgaaccagcattcacctcgtttaacgcgcggcttgccggagcgtgaagacagcctggaagagtcttactgggatcgttaagttatcgtcggttcgtaggccagataaggcgttcacgccgcatctggcatttggctctcgatgcccgatgcgacgctggcgcgtcttatcatgcctacatatttttcatattttacatccggcaaccaccgtttaccccgtcaccacttcacccgccggtggcgtttccagcagttccagcatagtacgggcaatttcacgttcacccatcactacctgattcgcgccacgttcggtgatatacgtcacttcatcgtcataatgggcgcgggcgataatctcaatatccgggttttcgcgcgggcagacgccacaatctcacccgcttcataaccgttggggatcgtcaggatcagccattttgcacattccagatgcgccagttgcataatttcttcgttcgctgcattgcccaatacagcgcggaccccacgctctcgcagctcatcaacacgggttcgtgacgtctcaatcaccaccagcggaatatcagaggcgagcaatttctcccccagcaggctgcctacacgaccgtaacccaccaatagcgcatggttgcaaatatccactgggatctgtttctcttcttcgattgcctcttccagcgtctgctcttccagcgtttcggtcttcgccagatatttctccagtagtgcgaacagtaccgggttgagcataatcgacaggatcgcccctgccagtaccaggttttgtccggcctgcggcagtaaattcaatgccattcccagtcccgccaggataaacgcgaactcaccaatctgcgccaggctggcggcgatggttaatgccgtacgttgggagtgaccaaacagtcgcaccaggaaaaatgcggctaacgacttaccaaacagaataatcgccagcgtcgccagcactgccagcggttgctgaatcagaattaacggatcaaacaacatcccgacggagacaaaaaacagcaccgcaaacgcgtcgcgcaatggcagcgtatcgtgggcggcacggtgactcagttcagactcgttcagtaccatcccggcaaagaacgcaccgagtgcaaaggagacatcaaacagctctaccgcaccaaaggcaatccctaacgccagcgccagcaccgacagggtaaacagctcgcgagaaccggttgccgcgctgcgtgccataatccacggcaccagacggcgacctaccagcatcataatggcgataaatgcgatcactttgccgatggtgatccccatatcgactgcaagagtggcaaagcccacatcgccctgttccatcattcctgccactgcgggcagcaacaccagcgtcagaaccattaccaggtcttccacaatcaaccaaccgatggcgatttgcccacgctgactgtcaattaattgccgttcttcaagtgcgcgcagtaacaccacggtactggcggtggaaagacataaaccgaacacgataccggtcattaacgaccagcccagcacggcagagagcgccatacccagcagcgtcgccacggctatctgggcgatcgcaccgggaatggcgatggcctttaccgccatcaaatccttcagcgaaaaatgcaaaccgacgccgaacatcagcaaaataacgcccagttcagccagttccggcgcaagcttggtatcggcaacaaagcccggagtgaatggtcctgccagcacacccgctaacagatatcccaccagaggagaaatacgtagtttattggccagcatgccgaggataaaggcgagcacaaggccgccaacaatggtggtgataagcggggtggcgtgatgcattccgtctccttttcctggtggttattgtccatttttggccggggaaaccaaaattacaggtaatagtttatgacaatttcattgatgatgttcatgaataattattgaattttgcagaaaaatggaattagctgcaaaaaaagcacggatcggaaaacagaaggcggtttaacagaggaaaggcttatggcgactgtaaaacgatgcagccaaagtttgcctttggctgcaatgaaatcagtctttatgccggttatcaggcaggaatatggtcaacatccccaatagtggcaggaaagcacagattttatagactaactcgatactggtgtgatcggcgataagccccagaactgccgctcccagacctcccataccaaaagcaaaaccgaaaaagagtccagaaaccataccgatacgtcccggaagcagctcctgagcgtaaaccagaatggcagagaatgccgaagcgaggataaatccaataatcaccgttaaaacccccgtccagtgcaggctggcgtagggtaaaatcagcgtaaacggcgcaacgccgaggatagagccccaaatcacatatttccgcccaattttatcccctacaggcccgccgatcaccgtacctgccgcaacggcaaacaggatggcaaacagatgaagctgagcattctggatagataatccgaatttttgcatcagataaaaggtgtaatagctgctgatgctcgccatatagaaatatttcgagaaaatgaggattaacagaatgctgaccgccagtaccactttgttgcgcggcagtggattgataatcgtcgctttgggttttcctttattcattcggtgctgtgccgagtaccaacggctgatttgcgccaacaccacgatcgccagcagtgccgcaagcacaaaccaggcaacgttgcctttgccataaggcgcgataatcaccgccgccagcaagggtcccagggaactgccaaagttgccgccgacctgaaagatagattgcgccaggccatgccgcccgccggaagccatacgggctacgcgagaagattccggatgaaagaccgatgaaccggtaccgaccagcgccgccgccagcagaactgcgccaaaactgcccgccagcgcaagcagcaccagaccacttaaggtaaagcacatgccaattggcaacgaccacggcatcggatatttatcggtccagtagccgaccactggttgcagtagcgaagaggcgagctggaaggtgagggttatcatgccaatctgcataaatgtcagagaaaattctgactgaagcagcggataaatcgccagaatcagcgattggatcatgtcgttcagcagatgtgagaggctgatagcacctaaaataccaaacgatgttcgggccttggtcgttgacgcagccgcgcccgccacaggctggggttgttcactcattgccataggaaagtcactttttcagggttgcgatgtaaagaatgatcttatttgtgattattacccgactaacatacctgtatgcgtcgcctgaaggaagtctcaacgccgaatacagaatttctaatctggatgcagatttatcttcaccggacgcagacttgtctatgatgtcgcgtcatactatttttcaacacgttgaaatcaggtcagggagagaagtatgaaattattgcagcggggcgtggcgttagcgctgttaaccacatttacactggcgagtgaaactgctctggcgtatgagcaggataaaacctacaaaattacagttctgcataccaatgatcatcatgggcatttttggcgcaatgaatatggcgaatatggtctggcggcgcaaaaaacgctggtggatggtatccgcaaagaggttgcggctgaaggcggtagcgtgctgctactttccggtggcgacattaacactggcgtgcccgagtctgacttacaggatgccgaacctgattttcgcggtatgaatctggtgggctatgacgcgatggcgatcggtaatcatgaatttgataatccgctcaccgtattacgccagcaggaaaagtgggccaagttcccgttgctttccgcgaatatctaccagaaaagtactggcgagcgcctgtttaaaccgtgggcgctgtttaagcgtcaggatctgaaaattgccgtcattgggctgacaaccgatgacacagcaaaaattggtaacccggaatacttcactgatgtcgaatttcgtaagcccgccgatgaagcgaagctggtgattcaggagctgcaacagacagaaaagccagacattattatcgcggcgacccatatggggcattacgataatggtgagcacggctctaacgcaccgggcgatgtggagatggcacgcgcgctgcctgccggatcgctggcgatgatcgtcggtggtcactcgcaagatccggtctgcatggcggcagaaaacaaaaaacaggtcgattacgtgccgggtacgccatgcaagccagatcaacaaaacggcatctggattgtgcaggcgcatgagtggggcaaatacgtgggacgggctgattttgagtttcgtaatggcgaaatgaaaatggttaactaccagctgattccggtgaacctgaagaagaaagtgacctgggaagacgggaaaagcgagcgcgtgctttacactcctgaaatcgctgaaaaccagcaaatgatctcgctgttatcaccgttccagaacaaaggcaaagcgcagctggaagtgaaaataggcgaaaccaatggtcgtctggaaggcgatcgtgacaaagtgcgttttgtacagaccaatatggggcggttgattctggcagcccaaatggatcgcactggtgccgactttgcggtgatgagcggaggcggaattcgtgattctatcgaagcaggcgatatcagctataaaaacgtgctgaaagtgcagccattcggcaatgtggtggtgtatgccgacatgaccggtaaagaggtgattgattacctgaccgccgtcgcgcagatgaagccagattcaggtgcctacccgcaatttgccaacgttagctttgtggcgaaagacggcaaactgaacgaccttaaaatcaaaggcgaaccggtcgatccggcgaaaacttaccgtatggcgacattaaacttcaatgccaccggcggtgatggatatccgcgccttgataacaaaccgggctatgtgaataccggctttattgatgccgaagtgctgaaagcgtatatccagaaaagctcgccgctggatgtgagtgtttatgaaccgaaaggtgaggtgagctggcagtaatccgaaagtgccggatgtttgcatccggcacaatgcttaatcgcggcgggcgatatcagcaaatttggcatcgaggatctttgccagatcgcctgccgccagttcgatatccagtccgcgcttgccgccggaaacataaatagtggcaaattcttgtgcgggggcgtcgataatcgttggcagacgttttttctgccccagtgggctaatccccccaactaggtatcccgtcgaacgctgcgcgaccatcggatcggccatctcaactttcttggcacccagcgcttttgctacttttttaagatccagttgacctgcgaccggcgtaacggccacggcaaggtgtttcatatcaccgttcactgccaccagcagcgttttgtagacctgatccggattcaaacctaattttttgacgacttcatcgccaaaattggtttcagccggatcgtgctcgtaggtatggatttgaaacgaaatcttgtttttttcgagtaatttaactgcgggtgtcatggtaattttcctgccttaaacaaaaaaacgaagcaagcatacgcctgatggcggtccaaaaaaaagagtcatcttgcctaagagtattggcaggatggtgagattgagcgacaatcgagttacaccgtcgcttaaagtgacggcataataataaaaaaatgaaattcctctttgacgggccaatagcgatattggccatttttttagcgcaacatttgcggcaaattcccttctccatacaggtgtagtgcaccgaccgcgaccacatatcgccccggcggcatggcgcgtaatttatcccgccaggcgagatttcgctgatgcatcagcacatcgtacagcgactgactgaacgtattgggcagcgttatatcattattttgcggaggtgcattcagccaccagctcatcatttgttgcagcaaccgtgcgttggtatgccagtgggtcagcgtatcgtccagcagcgccagtcctttgtcagggagctggagcaacatggtaatctggttttcagccccttccagttcaatcacgggtttatgttgttgcttcgccgcctgcaataactggtaatcgataccgtattctgcccgcagccccagtttttgtgcctgcgtcgcctgaagaaccatcgcgatttgccacagcggttgagtagaaaagagcgacggagaaatgcccatctcctggctaatgtgctgcagattttggagttgctcctcgttaatgcgctcttccagcgcctcgcaagtaggcaaattagcaaaaggcgtatcgctggtggaaacatccgcctcgacgatcagcgcatcggcgtttttgagctttttgagcaaacgggtgggcaggggagccatatcgtggctacccatatgaatactgccaatcagatgaaaatggcgattgccgggaagggtgatatcgatggcaggccaggtgtaatgattaccgcgcagcgcggcccaaagcgtttttacccggtacaacagatccatacgacctccctttgtgaaatatcatgctagcgcgcggtgagggatggcgcaaatggagttggggacttgtttaatgtgtttgtatgattcagtatgttcttgcatcgctattcacagggaagcaacagttaaaaaaccatgaaacaggcaacaagaaaaccgacgacacccggagatattcttctctatgaatatcaggaaccgctcgatttgaaaatcaatgagttagcagagttgctgcatgttcatcgtaatagcgtcagtgcactgatcaataacaatcgtaaactcaccactgagatggcattccgtctggcgaaagtttttgataccacagtcgattttaggctaaacctccaggcggcagttgatctttgggaagttgaaaacaacatgcgcacccaggaagaattgggacggattgaaacagtggctgaatatttggcacgccgtgaagagcgtgcaaaaaaggtcgcgtaaggccaaaacatcgcttcatctcgtaggccggataaggcgtttacgccgcatccggcagtcatgcgtcgatgccaaatgcgccgccctaaagcagcgcatccgcaatgacgtacttattccttcggtttaaaccgcagcaaccggttggcgttactcactacggtaatcgacgagagcgccattgccgctccggcaactaccgggttaagcagtgttccagtaaacggccacaaaataccggcggcgaccggaataccgatgctgttgtagataaaggcaccgagcaggttctgcttcatgttgcgcagcgttgcgcgggaaatcgcgagcgcatccgcaacgcccatcaggctatggcgcatcagggtaatcgccgcggtttcaatggcaacatcactgccgccacccatcgcaatgccgacatccgcctgggccagcgctggcgcgtcgttaatgccgtcgcccaccattgccacctgacgtccttcactttgcagacgtttgatcgcttcggctttaccgtccggcagcactccggcaatcacttcatcaattccagcttctttggcgatcgcattggcggtggttgggttatccccggtcaacatcaccagacgatatcccgctttatgcaggcgttgcagcgccgccacgctatcactacgcaacggatcgcgtacagccagcagggctactgctttcccgtcaatcgccagcagcacaggcgttgctccttgcgatgcctgagcagtaatctccgcttcgatagctttggtaccaacctgttgctcatttaacagcgcctgattgcccagcaataacgcatgaccttcagcttcaccgctcacgcccagcccgcgcaatgtgcggaaaccgttgacctgcggcagctgcatatcacctgctttatcgaggatcgcccgtgccagcggatggctggaaccttgctccagtgccgccgccagacgcaatgcctgcgcttcatcaacatcagcaaacgttttcactgcgacaacctgcggcttcccttcggtcagcgtcccggttttatcgaacacgacggtatcgagtgtactggcgcgttgcagcgcgtcggcgtcccgcaccagcacgccaaactcagccgcccgcccgacgccggaaataatcgacatcggcgtcgccagccccagcgcacacggacaggcgataatcagtaccgtggtggcaatcaccagggtataaacaatttgcggtgccggaccaaagaagtaccagattgccgcactgaccagcgcaatcaccaccaccacaggtacaaatacggctgagattttatccgccagctgaccgatttctggcttgctgctctgggcctggcgcaccatgcgaatgatccgtgacagcgtggtatggctgccaaccgcactggcacgaaacagcacgctaccgtcctgtaccactgtcccggcatggacgctttcgccttcgcctttttgctgcgggattggttcgcccgtcagcatcgcttcatccagccatgcttcgccctgggtaatctcgccatctaccggcacgcgatcgccggtcgtcaggcgcagcaacatacctggctgcacttccgccagaggcacgcttttttcaccttcgtcagtaaccaggcgcgccgtcggtggggttaaatcgagtaatttctccagcgccttagaagaacgctgacgtgcgcgtgcttccagcatatggccgagattgatcagaccgataatcatcgcgctggcttcgtaataaagatgtcgcgcttccatcgggaaccactgcggccacaggttgacgctcatcgaatagagccacgccacgccagtacccagcgccaccagcgtatccatcgtcgctgcaccgttcagcaggcttttccatgcactgcggtaaaaatggccgccggcgaaaaccatcaccgccagggttatcaggccgataaccaaccacaggctgcggttgtcagcggtgaccatcatgttatcgccaatcatcccccagaccatcaccgggatacccaccgccagtgcgacaattgcctgccagcggaagcgcttcatcgtagcaacggcggtttcctgctggcgctcacggcgtttcgcgtcatcttcaatcgcttccgcgccgtagcccgctttttccaccgcctgcactaaatcttgtggggaggcactgcccatcaccagcgcagtacgctccgccaggtttacccgtgcctgagtgacgcccggtacgctttgcagcgcattttgtacgcgggtgacacagctggcgcagctcatgccgctcagcagcaactgctggctgtcatcgtcatcggcggtcgctgccggaagcgcctcagaaaccgctgtcagtgcttccgacgggattgatgactccgccagcggtttagcctttgggtggcttacagatgcgtcataacccgcttgtttgatggtttcgatcagctgttctgcactggcagtcccggtaacgtgcgcttcagtgatagacacatccgcttgttccacatccgggcgctgttcgagactttctttcacgcgtttaacgcagtgaccgcaggacaggccgtccagggtcaggtcgataatttgtgacataaaacactcctttaagacagttttgactggctgtgataaaggttaaaccttccagcaaggggaaggtcaagaaattaataaaccaggcgagtaaaagtccgtaaagattaaaaaattggctcaatttgcatcaggattagacatttatctctttgttttcctgtagttaagttgcgggtgctaagttaaatcaggatgcctcaaaatcggcaccggggtgaggaattacctcccgcatctataaaaaggagttaacaaaagatgttagatgcaaacaaattacagcaggcagtggatcaggcttacacccaatttcactcacttaacggcggtcaaaatgccgactacattccctttctggcgaatgtgcctggtcaactggcggcagtggctatcgtgacctgcgatggcaaggtctatagtgcgggtgacagtgattaccgctttgcgctggaatccatctcgaaagtctgtacgttagcccttgcgttagaggatgtcggcccgcaggcggtacaggacaaaattggcgctgacccgaccggattgccctttaactcagttatcgccttagagttgcatggcggcaaaccgctttcgccactggtaaatgctggcgccattgccaccaccagcctgattaacgctgaaaatgttgaacaacgctggcagcgaattttacatatccaacagcaactggctggtgagcaggtagcgctctctgacgaagtcaaccagtcggaacaaacaaccaacttccataaccgggccattgcctggctgctgtactccgccggatatctctattgtgatgcaatggaagcctgtgacgtgtacacccgtcagtgctccacgctcctcaatactgttgaactggcaacacttggcgcgacgctggcggcggggggagtgaatccgctgacgcataaacgcgttcttcaggccgataacgtgccgtacattctggccgaaatgatgatggaagggctgtatggtcgctccggtgagtgggcatatcgcgttggtttaccgggcaaaagcggtgtaggtggcggtattctggcggtcgtccctggtgtgatgggaattgccgcgttctcaccaccgctggacgaagaaggcaacagtgttcgcggtcaaaaaatggtggcatcggtcgctaagcaactcggctataacgtgtttaagggctgatcatgatgaacacggaaggtaataacggtaacaaacccctcggtctatggaatgtcgtttccatcggtattggggcaatggtgggggcggggatcttcgcgctgctggggcaggctgcgttgctaatggaagcctcgacctgggtcgcctttgcttttggcggtattgtggcgatgttttccggttatgcctatgcgcgtctgggggcgagctatcccagcaatggcggcattatcgacttctttcgtcgcggattaggcaacggcgtcttttcgctggcgctctcgttactgtacctgttgacgctggcggtgagcatcgccatggtcgcccgtgcttttggcgcttatgccgtgcagttttgcatgaaggcagccaggaggagcaccttattttgctctacgcgttggggatcattgcggtgatgacgcttttcaactccttaagcaaccatgcggtagggcggctggaagtgatcctcgtcggcattaaaatgatgatcctgttattgctgattattgccggtgtctggtcgctgcaaccggcgcatatttccgtctctgcgccccccagctccggtgcgttcttctcctgtatcgggataaccttccttgcctatgcgggctttggcatgatggcgaacgcggcggataaagtgaaagatccgcaggtcattatgccgcgggcgtttctggtggcgattggcgttaccacgttgctttatatctcgctggcactggttttgcttagcgatgtatcggcattagagttagaaaaatatgccgataccgccgtagcgcaggctgcttctccgctgctcggacatgtgggttatgtgatcgtcgtcatcggcgctttactggcgacggcttcagccattaacgcgaacctgttcgccgtgtttaacatcatggacaacatgggcagcgaacgcgaactgccgaagctaatgaataaatccctgtggcggcagagtacctggggcaacatcattgtcgtggtgttgattatgctgatgacggcggcgctaaatttaggctcactcgccagtgttgccagcgccacctttttgatttgctacctggcggtgtttgtggtggcgatccgcctgcgtcatgatattcacgcctcgttgccgattcttatcgttggtacgttggtgatgttgttggtgatcgttggctttatctacagtctgtggtcccagggtagccgtgcgttgatatggattattggctcactcttactcagccttattgtggcaatggtcatgaagcgcaataaaaccgtataacatctctctgtgcgcagtacttcctgtattattgtggtggcggtcgatattcgcactggcaaaaaaacgtgcttgaatatctgttgaaaccctttaacaaagcacaggaggcgttgcgcgaacgatgaacatcagcgatgtagcaaaaattaccggcctgaccagcaaagccattcgcttctatgaagagaaggggctggtgacgccgccgatgcgcagcgaaaacggttatcgcacctacacgcagcagcatctcaacgaactgaccttactgcgccaggcacggcaggtgggctttaacctggaagagagcggcgagctggtgaatctgtttaacgacccgcagcggcacagcgccgacgtcaaacggcgcacgctggagaaggtggcggagatcgaacgacacattgaggagctgcaatccatgcgcgaccagctgctggcactggcgaatgcctgccctggcgatgacagcgccgactgcccgattatcgaaaatctctccggctgctgtcatcatcgggcagggtgattaagacgagacggctcggatatgtagggttatcccttctatcgcaatgacttcaacatgcgtacctgcaccgagatcctcgctggcgctgacaggccatgaactgtcaccgacgcgcatatgaccgcgcccgttgaccagcggagattccagcacaaaacgtcggccaatcagctgctgcccgcgctggtttaaatgactatcgctgtgcttttgttcgcgcacccgccgcgacaaccatttccaccacagccaggcggcgagcagcgtcaggatggcaaacattaccccttgccactcccaacccagcggcaccagccagaccaccaggccggtaatcaccgctgccacgccgctccacaacaaataaccatttccgcccagcatctcggctgccagcagcaaaccgccgagactgagccagaaaatatgtggatgaacgaccattaactccatcatggctgagtccgtttgttggcgctgtctttcaccagctcggcaatcccggcaatcgaccccatcaggctgctggcctctaatggcatcatcactactttgctgttactggaggaaccgatctgctgtaacgcttcggtgtatttctgcgctacgaagtagttcaccgcctgaatatcaccggaggcgatggcttcagacaccattttggtggcgcgggcttctgcttcagcggaacgttcacgcgcttcagcctgtaaaaacgccgactgacgttcgccttccgctttcaggatttgcgactgtttttcaccttcggctttgaggatttccgcctgacggatcccttccgcttcaagaatgtaagcgcgtttggtacgttccgctttcatctgcgcgttcattgaagagataagctctgccggtgggcgcacgtcgcgaatttcaatacgggtgactttaatcccccacgggttggtggcttcatcgacaatacgcagcaggcgtgagttgatgctgtcgcgctgagagagcatttcgtcaagttccattgaacccaacacggtacggatgttagtcatggtcaggttgatgatcgccagctccagattgctgacttcataagccgcgcgcggcgcgtcaatcacctgaataaaacagactgcgtcgatggtaacgttggcgttatctttcgagataacttcctgggaagggatatcgagcacttgctccatcatattgatcttgcgaccaatgcgatccataaacggcaccaccagactgagccccggctgtaacgttttggtatagcgaccaaaacgttctaccgtccattgatagccctgcggcacgattttgacgcccgcgccgacaatgaccagcgcgacaaaaatgagaatcgggataaagataagcatcggaaaaacctcctgttgtaccgtccataatcagcaaaattgctgcttgattaaacaaattatacctgattactgaaagagagttcccccttattcctgcgaaggataaactgtttttagtaaaaatcagaaaaagggaacagcgatgcaggaaaatagtcctttgcttcagctacaaaacgtaggatatctggcgggtgatgcgaagattcttaataacatcaatttttcgctgcgtgctggcgaatttaagttaattaccggtccttctggttgtggcaaaagtacgctgctaaaaatagttgcttcattgatcagcccaaccagcggaacgttactgtttgaaggtgaggatgtcagcacactaaagccagaaatctaccgccagcaagtctcttactgcgcccagacgccgacgctgtttggcgatacggtatacgataatctgatctttccctggcagatccgtaaccagcagcctgacccggccatttttctcgattttctcgaacgcttcgctttgccggacagcattttgacgaaaaatatcgccgagctatctggtggtgaaaaacaacgcatctcactgattcgtaacctgcaatttatgccgaaggttttattgctggatgaaatcaccagtgcgctggatgaaagtaataaacataacgttaatgagatgatccatcgttatgtgcgcgagcaaaatattgccgtgctgtgggtgacacacgataaagacgaaattaatcatgcggataaagtgattacactgcaaccgcatgccggagaaatgcaggaagcacgctatgaactcgcataatattactaacgaatcattagcactggcattaatgctggtggtggtggcaatcttaattagccataaagaaaaactggcgctggagaaagatattctctggagcgtcgggcgagcgataattcagctgattattgtcggctatgtgctgaagtatattttcagcgtggatgatgccagcctgacattattgatggtgttatttatctgctttaatgcggcgtggaacgcgcaaaaacgcagtaaatatattgctaaagcttttatctcatcgtttgttgccattacggtcggggcgggaattaccctggcggtgctgattctctcagggtcgattgaatttatcccgatgcaggtgatccctatcgccgggatgattgccggtaacgccatggtagcggtggggttgtgttacaacaatttagggcaacgggtcattagcgaacagcaacagattcaggagaaactgagtcttggtgcgacgccgaagcaggcttcagcgatattgattcgcgacagtattcgcgcggctttaattccgacggtcgattcagcaaaaacggttggcttagtgagtttaccaggaatgatgtccgggctgatatttgccgggattgatccggtgaaggcgattaaatatcagattatggtgacctttatgctgctctcaaccgccagcttgtcgaccattattgcctgctatttaacctatcgtaagttttataattcgcgccaccagttggtggtgacgcaattgaagaagaaataatgcgatgccggatgcgcagcatcgcatccggcgttgtggttcatgtgccgatcaacggaatatcaatacaacaatgcatacagctggcggcgatacttcgacgccagtgcatcacccgtacccagcgcagcgaggatctcctggaacgttttacgcgtctgaccgtctgcggcggtgagatctttacgcagatgcccgaacagcaactccagcgcctcttcattgcgcccaacctggtgcagttgcagagccagttgcgtcgccagtgcggcatcttctggattctccgccacctgctgttgcaactgttgaatttccggcgtatcagccgcctgcttcagcagttcgatttgcgccaccagcccctggtagcgggtgtcctgatcctgcaacggaatggttttcagcaccgcttccgcatcttcagaacggttcagcgcaatcagcgtttctgccagcagcaggccgatctccccgttctgattcgacaactgccaggcgtctttcagcaatggcagggcatcggtgtaattgccttcctgcatcagttgcatcgcctgctgcgctttcagctcttcttcgcgcggcagcactttatccagcagggcgcggatcgcctcttccggttgcggcccctggaagccatctaccggttgcccgttctggaacagatacacggtcggaatcgcgcgcagaccaaactgggcggcaatcatctgctccgcgtcgcagtccagcttcgccagaataaattgcccgttgtactgcgccgcgaggctttccaggatcggggttaactgcaaacagtgctggctacgttcagaccaaaaatagaacagcaccggagtggtcatcgactgttcaagaacctgttgcaggttagattcgttaatgttgacaatattttctacggacatggagtcgctctctgttgtcgatattttctttgacatgggggcttaagcgcgcgcttcaactcacccctgcaatattttgtccatcacgcgccccggcagcaggcgcttaagcaccattactgcccaggtcaccagcgttaccggatagcgcatcttcggcttctcgctaataaaagcatggcgtactttgtccaccaccgcttccggtcccaacgtaaagcgggcggcgatgccgggattttcgactggtttatcactttgcgtctggttgacgttgtcggtgaagcgagtacgaatgggaccgggttcgatcaggctgactttaattccgctgtggcgtagctccatgcgcagcgcgtctgaccacgcctccagcgcatatttactggccgcgtaagcgccacgacccggcgtggagattaatcccatcaccgatgatgtcatcacaatacgcccttcaccgtgcggtaacatcgcgggtaacaggcgcatggtgagctggtgtgcgccgaaaaagttggcggaaaactgctgttccatctgcgcacggctgatggtggaaagggggccatacatgccgaatccggcattgttaaagatcccatacagacaattatcggtcagggcgatcacttcgtcggctgcgcgatcaacactttctggcgaatccagatcgatcaacacgccggtaaatcccatgctgttcatacgctcaacatcatccggtttccggcaacctgccagcacatgaaaaccctggcgttttaattcgagcgcgctttccaggccaattccactggaacatccggtaattaagaccgatttttgcataactttacctgtcaggatctccgttgctttatgagtcatgatttactaaaggctgcaactgcttcgccatccagtcggcaataaacggctgggcgtcgcggttgggatgaataccgtcatcctgcatccattgtggcttgaggtagacctcttccataaaaaagggcagcagcggaacatcaaactctttggcgagtttggggtaaatggcgctaaaggcttcattataacggcgaccatagtttgcaggcagacgtatttgcattaacaatggttcagcgttggcggctttgacatcctgcaaaatctggcgcagcgtttgctcggtttgctgtggctgaaaaccacgcaaaccgtcattgccgcccagttcaaccagcacccaacgcggctgatgctgtttcagcagagccggaaggcgcgccagtccttgttgcgaggtgtcgccgctgatgctggcattaactaccgacgttttactctgccacttatcattcaacaaggcaggccaggccgcgctggcagacattcgatacccggcgctcaggctatcacccagaatcaataacgtgtccgctgcggcggcacggaaggttaacaggaccaggaacaggaagggcaaatgccagcggaaaacattgttgaagttcatcatcttaagaagtccgtcggtcagggggagcatgaactctccatcctcaccggagttgagctggttgtcaaacgtggcgagaccatcgcactggtgggcgagtcgggatcgggtaagtcaaccttgctggcgatcctcgccgggcttgatgacggcagcagtggcgaagtgagtctggtgggacaaccgctacataatatggacgaagaagcgcgggcaaagttgcgcgcgaagcacgtcggctttgtttttcagtcatttatgttaattcctacccttaacgcgctggaaaacgtcgagcttccggctctgctgcgcggtgagagtagcgcggaaagtcgtaacggggcgaaagcgttgctcgaacagttagggctgggtaaacgtctggatcatcttccggcacagctttccggcggtgaacagcaacgagtggcgctggcacgagcctttaatggtcgacctgatgtgctgtttgccgacgaacccaccggcaaccttgaccgccagacgggcgataaaattgccgacctgctgttttccctcaaccgtgaacatggcaccacgttgattatggtgacccacgacctgcaactggcggcacgctgcgaccgctgcttacggctggtgaacgggcagttgcaggaggaagcatgattgcacgttggttctggcgcgaatggcgttcgccgtcgctattaattgtctggctggcgctaagcctggcggtggcctgcgtgctggcgctgggtaatatcagcgatcgcatggaaaaaggcttaagccagcaaagccgtgaatttatggcgggcgatcgggcgttgcgcagttcgcgcgaagtgccgcaagcgtggctggaggaagcgcaaaagcgcggcctgaaagtcggcaagcagctgactttcgccaccatgacatttgcaggcgacacaccgcagctggcgaacgttaaagcggtggatgatatctacccgatgtatggcgatctgcaaaccaatccccctggcctgaaaccgcaggcgggcagcgtattgctggccccacgcctgatggcactgcttaacctgaaaacgggcgacaccattgacgtgggcgatgccaccttgcggattgccggagaagtgattcaggaaccggattccggttttaaccccttccagatggctccgcgtctgatgatgaatctggcggatgtcgataaaaccggagccgtgcagccggggagtcgggtcacctggcgctataaattcggcggcagtgagaaccagctcgacagctatgagaaatggttgttacctcagcttaaacccgaacaacgctggtacggtctggaacaggacgaaggcgcgctggggcgatcgatggaacgctcgcaacagttcctgctgctttcggcgcttctgaccttgctgctggcagtggcagcagtggcggtagcgatgaatcattactgtcgcagtcgctacgatctggtggcgatcctcaaaacgctgggggcagggcgagcgcaactgcgtaagctaatcgtcggtcagtggttgatggtgctgacgctttcagccgttaccggtggggcgataggcctgttgttcgaaaacgtgttgatggtgctgctcaagcccgttctgcctgctgcactaccgccagccagcctctggccgtggctatgggcgctgggcaccatgacggtcatctcgctgctggtggggctacgaccataccgcttgttgctggcaacgcagcctttacgcgtattacgtaatgatgtggtagcgaacgtctggccgctgaagttttatctgccgattgtcagtgtagtggttgtgctgctgctcgccggattaatggggggcagtatgctgctctgggcggtgctggcgggcgcggtagtactggctttgctgtgcggtgtgctgggctggatgctgctgaatgtacttcgccgcatgacgctgaaatcgctgcctctgcgcctggcggtcagccgcctgttacgtcagccgtggtcaacgttaagccagctttcggcattttcgctctcctttatgctgctggcactgctgctggtgttgcgtggtgatctgctcgaccgctggcagcagcagctacctccagaaagcccgaactactttttaattaacatcgccacagaacaggtagcaccgctaaaagcgttcctcgcggaacatcagatagtcccggaatcgttttatccggtggtgcgggcgcggctgacggcgattaacgataagccgacagaaggtaatgaagatgaggcgcttaaccgcgaactcaatcttacctggcaaaatacgcggcccgatcataatccgattgtcgccggtaactggccgccaaaagccgatgaagtgtcgatggaagaggggctggcgaaacgcttaaaggttgcctcggtgataccgtgacttttatgggcgatacccaggagttccgcgctaaagtgaccagcctgcgcaaagtggactgggaaagtctgcggcctaatttctattttattttcccggaaggggcattagacgggcaaccgcagagctggcttaccagtttccgctgggagaatggcaacggcatgttgacgcaactcaaccgccagttcccgaccattagcctgttagacattggcgcgattttaaaacaggtcggtcaggtgctggagcaggtaagtcgggcgctggaggtgatggtggtgctggtcaccgcctgcggtatgttgctgttgctggcacaggtgcaggtgggtatgcgtcagcgccaccaggagctggtggtgtggcgcacactcggtgcggggaaaaaactgctgcgtaccacgttgtggtgtgagttcgccatgcttgggtttgtttccggcctggtggccgcaattggtgcggaaacggcgctggcagtgttgcaggcgaaagtgtttgattttccgtgggagccagactggcgattgtggattgttctgccgtgcagcggagcgctgctgctgtcgcttttcggcggctggctgggtgcgcgactggttaagggtaaggcgctgttcaggcagtttgcggggtgatgagagtaaataaggggcgttctggttgaatggaacgccttgtttaaattaattctacaatatgtttcattgatgatgttattgaattggtgatttcctatctttctattgctgatattaatctgaatcggtggagtttattgattttaaatatagccctacaaaaataactcagactaataaaatcataaatcatatgcgttgaatggatattatccatatagtgaatttgttgatgatgaattcatctgtgctaaaaatgttagtttaataaaatattgaaagtgacctgtaataacagttgttgttgattgagaacaaataagtttatgtgaaaaatatataaatacattagctggtcttgtgtgtcattttatttttttgttgctaacacagggatatgaacaataactaaaagggcactttatatgagcggaaaaccagcggcgcgtcagggagatatgactcagtatggcggtcccattgtccagggttcggcaggtgtaagaattgggcgcgccaactggcgtggcgtgctcggtgtgtccgggcgggatgacttcgggcaacccggtaaatccgctgctgggggcgaaggtgctgcccggcgagacggaccttgcgctgcccggcccgctgccgttcattctctcccgcacctacagcagctaccggacgaagacgcctgcaccggtggggatttttggccccggctggaaagcgccttctgatatccgcttacagatacgcgatgatgcactggtactcaacgacaacggcggacggagcattcactttgagccgctgctgccgggtgaggcggtgtacagccgcagcgagtccctgtggctggtgcgtggcggtaaggcaacgcagccggacggccatacgctggcacggctgtgggcgtcgctgccgccggatatccggttaagcccgcatctttacctggcgaccaacagcgcacaggggccgtggtggatactggggtggtcagagctggtgccgggtgctgaggacgtactgccagcgccgctgccgccgtaccgggtgcttaccgggctggcagaccgcttcgggcggacgctgacgtaccggcgtgaggccgccggtgacctggccggggaaatcaccggcgtgacggacggtgccgggcgggagttccgtctggtgctgaccacgcaggcgcagcgtgcggaagaggcccgtaaacagcgcaccgcttccttatcttcccctgacacaccccgccctctctcagcctcagcgttccccgacacactgcccggtacggaatacggcactgacagcggtatccgtctttcggcggtgtggctgatgcacgacccggaatacccggaaaatttacctgccgcgccactggtgtgctacgactggacgccacgcggtgagctggcggcggtgtatgaccgcagcggtacgcagatgcgccactttacttacgatgataaataccggggccggatggtggggcaccgttatgcaggcaggccggagatgcgctaccgctacgacgatgcggggcgggtggtggagcaactgaacccggcagggttaagctaccgctatctttatgagcaggaccgcatcaccgtcaccgacagcctgaaccggcgtgaggtgctgcatacagagggcggggccgggctgaaacgggtggtgaaaaaagaactggcggacggcagcgtcacgcgcagcgggtatgacgcggcaggaaggctcacggcgcagacggacgcgtcgggacggcggacagagtacggtctgaatgtggtgtccggcgatatcacggacatcaccacaccggacgggcgggagacgaaattttactataacgacgggaaccagctgacggcggtggtgtccccggacgggctggagagccgccgggaatatgatgaaccgggcaggctggtatcggagacatcgcgcagcggggagacagtacgctaccgctacgatgacgcgcacagtgagttaccggccacgacaacagatgcgacgggcagcacccggcagatgacctggagccgctacgggcagttgctggcgttcaccgactgctcgggctaccagacccgttatgaatacgaccgcttcggccagatgacggcggtccaccgcgaggaaggcatcagcctttaccgccgctatgacaaccgtggccggttaacctcggtgaaagacgcacagggccgtgaaacgcggtatgaatacaacgccgcaggcgacctgactgccgttatcaccccggacggcaaccggagcgagacacagtacgatgcgtggggaaaggcggtcagcaccacgcagggcgggctgacgcgcagtatggagtacgatgctgccggacgtgtcatcagcctgaccaacgagaacggcagccacagcgtcttcagttacgatgcgctggaccggctggtacagcagggcggctttgacgggcggacgcaacgttatcattatgacctgaccggaaaactcacgcagagtgaagatgaggggcttgtcaccctctggcactacgatgcgtcggaccgcatcacgcaccggacggtgaacggcgacccggcagagcagtggcagtatgacggccacggctggctgagagaaatcagccacctgagcgaaggccaccgtgtcgctgtccactacggctacgacgataagggccgcctgacgggcgaacggcagacggtggagaacccggagacgggggaactgctgtggcagcatgagacgaaacacgcctacaacgaacaggggctggcaaaccgcgtcacgccggacagcctgccgccggtggagtggctgacctacggcagcggttacctggcgggcatgaagctgggcgggacgccgctggtcgagtatacgcgggacaggctgcaccgggagacggtgcgcagcttcggcagcagggcaggcagtaatgccgcatatgaactgaccagcacatacacccccgcaggccagttacagagccagcacctgaacagcctggtgtatgaccgtgactacgggtggaatgacaacggcgacctggtgcgcatcagcggccgcgacagacgcgggaatacggctacagtgccacgggcaggctggagagcgtgcgcaccctcgcaccggacctggacatccgcatcccgtatgccacggacccggcgggcaaccggctgccggacccggagctgcacccggacagtaccctcacagtgtggccggataaccgcatcgcagaggatgcgcactatgtctaccgctacgatgaatacggcaggctggcggagaagacggaccgcatcccggcgggtgtgatacggacggacgacgagcgcacccatcactaccattacgacagcctgcaccgcctggtccattacatccgtatccaatatgaggagccgctggtcgagagccgatacctttacgacccgctgggtcgccggacagggaaacgggtgtggcgtcgcgagcgtgacctgacgggatggatgtcgctgtcgcggaaaccggaggtgacgtggtacgggtgggacggcgaccggctgacgacggtacagaccgacaccacgcgtatccagacggtatatcagccggggagcttcgcgccgctcatccgcatcgaaacagacaacggcgagcgggagaaagcgcagcgccgcagcctggcggagaagctgcagcaggaagggagcgaggacgggcacggcgtggtatttccggctgaactggtgcggctgctggacagactggaggaagaaatccgggcagaccgcgtgagcagtgaaagccgggcgtggcttgcgcagtgcgggctgacggtggagcaactggccagacaggtggagccggaatacacaccggcgcgaaaagctcatctttatcactgcgaccaccggggactgccgctggcgcttatcagcgaagacggcaatacggcgtggagcgcggaatatgatgaatggggcaaccagcttaatgaggagaacccgcatcatgtgtatcagccgtaccgtctgccagggcagcagcatgatgaggaatcagggctgtactataaccgtcaccggtactacgatccgttgcaggggcggtatattactcaggacccgatggggttgaaagggggatggaatttatatcagtatcctttaaatccactacaacaaattgaccctatgggattattgcagacttgggatgatgccagatctggagcatgtacggggggagtttgtggtgttctttcacgtataataggaccaagtaaatttgatagtactgcagatgctgcgttagatgctttgaaagaaacgcagaatagatctctatgtaatgatatggaatactctggtattgtctgtaaagatactaatggaaaatattttgcatctaaggcagaaactgataatttaagaaaggagtcatatcctctgaaaagaaaatgtcccacaggtacagatagagttgctgcttatcatactcacggtgcagatagtcatggcgattatgttgatgaatttttttcaagtagcgataaaaatcttgtaagaagtaaagataataatcttgaagcattttatctcgcaacacctgatggacgatttgaggcgcttaataataaaggagaatatattttatcagaaatagggtgatgctgccaacttactgatttagtgtatgatggtgtttttgaggtgctccagtggcttctgtttctatcagctgtccctcctgttcagctactgacggggtggtgcgtaacggcaaaagcaccgccggacatcagcgctatctctgctctcactgccgtaaaacatggcaactgcagttcacttacaccgcttctcaacccggtacgcaccagaaaatcattgatatggccatgaatggcgttggatgccgggcaactgcccgcattatgggcgttggcctcaacacgattttacgtcacttaaaaaactcaggccgcagtcggtaacctcgcgcatacagccgggcagtgacgtcatcgtctgcgcggaaatggacgaacagtggggctatgtcggggctaaatcgcgccagcgctggctgtttacgcgtatgacaggctccggaagacggttgttgcgcacgtattcggtgaacgcacgatggcgacgctggggcgtcttatgagcctgctgtcaccctttgacgtggtgatatggatgacggatggctggccgctgtatgaatcccgcctgaagggaaagctgcacgtaatcagcaagcgatatacgcagcgaattgagcggcataacctgaatctgaggcagcacctggcacggctgggacggaagtcgctgtcgttctcaaaatcggtggagctgcatgacaaagtcatcgggcattatctgaacataaacactatcaataagttggatatacttttatcagaaatagtgtcccgggattgagttcagtatgcataccgtatcatgattaattttagtgcttttattagtggggcctataaggagattcaatgaaatatagttcaatattttcgatgctttcattttttatactatttgcctgtaatgagacagctgtttacggttctgatgaaaacattatttttatgaggtatgtggaaaaattacatttagataaatactctgttaaaaatacggtaaaaactgaaacaatggcgatacaattagctgaaatatatgttaggtatcgctatggcgaacggattgcagaagaagaaaaaccatatttaattacggaactaccagatagttgggttgttgagggagcaaagttaccttatgaagttgcgggtggtgtatttattatagaaattaataagaaaaatggatgtgttttgaatttcctacatagtaaataatgctggcgctgatggatgcggatggaaacattgcgtggagcggggagtatgatgagtggggcaaccagctgaatgaagagaacccgcatcacctgcaccagccgtaccggctgccggggcagcagtatgataaggagtcggggctgtactacaaccggaaccggtactacgatccgttgcaggggcggtatatcactcaggacccgatagggctggaggggggatggagtctgtatgcgtatccgctgaatccggtgaatggtattgatccattagggttaagtcctgcagatgtagcgttaatgcgaaaaaaagaacaactaaaccatcaaagagcatgggatatattatctgatacttatgatgatatgaagagattaaatttaggtgggactgatcaatttttccattgtatggcattttgtcgagtgtctaaattaaatgacgctggtgttagccgatcagcgaaagggctgggttatgaaaaagagattagagattacgggttaaatatgttcggtatgtacggcagaaaagtaaagttatcccattctgagatgattgaagataataaaaaagacttggctgtaaatgaacatgggttgacatgtccattaacacaagattgctcaaatagatgtattgattatattaatccagagcataaaaaaacgataaaggctttacaagatgctggctatctcaagtaacatctcaaagatggtaatatttatttttgctattataatcgttgtttttttatgcgtgactacttatctttatttacacaaagatgaatctcttgtaagtaagcattacataaactatatggcaataccagaaagtgatggagtttttacatggctcccagattttttttcgcacgtagcggtggatatatcaatatccacaaatgtagaagatgattattttttttcttatttttccctaacaatcgatgatggggggaggtttaagaaaacattgacggtgagggccagggaacaagtggcgaaaatcgtatcagataatgatccagatacaaaaaaagtgtggtgtaaatatggtaaaataccagggcaaggggatagcgtaaaccttttttttgttggtgaaattaatgttacgcattattttataacaaatattggagctggattgcctgatgcttgtgcagagtaattgcttgaattaagagtctatcccatatcgaagtcgtcaacttcgtagtgaggaaaagtaaaattcctgactgagaaaagacatgtcggctattgtgtaaagccatatagctcagacgatgaatatctactcgtattcagttgtttattgagggtgagttccgaccctgaaacaacaaataaaatgaacagtcagagagtttacatagaattgcactggtcttttacgatatctgacattgtgtaatacatattcagccatgcattaattaaaatgttacgtgtttaatgtgagtccctatctgaaaataaataatccttccggattaaaataaattcttgccgggaaagaaagaggaaataaaccattagcggaaaaccagcggcacgccagggtgacatgccccagtacggcggcccgatagtccaaggttcagcgggggtactgatagtcgcgccgactgcatcgagaactccatacaactttttacggaacgtcacctgataaaatttgttcagtatcgtcttttgagattctcaaggttatggagtaaccagacagaacggacaccactgtcggagataaaaccccctgtttacgcagctcgttgctggcccggtgctgaccatgtgtcgggaaagcgacggcgtaatcaacaacagcctgttcagttgcctcatcggtacggttcttaaggttaggagcgcggcgactacgattaatctgcgcatccacaccgccttcagcgaccagttcgcggtaacgataaaacgtatcacgcgaaacgcccatgattttacaggcttttgatacgttgctgagttcttcagccagattgagcaaaccggctttgtgtttgatgacgggattggcagtatgaagcatgagagttacctcttgttttggataaggattcgacactcatatcaaaaccggtaactctcaacctttcaaggccatgtgtcagatcaagtcgcgactaatacaaatacgtccctcattaccgcgccttaacccattccgccacttccgcccactcaccgcgaaagacaactttttccgcttttttctcaagctgatagcgatacattgggtcgtaatattctttaagtaacggcaccagccaggccagatgaccgtcggtgctaccggttgcgagttgcgttgtcagcgctgcatccagccttgcagccagttcgttatagcgctgtagccccagccgacgcttgatcgccgaaagtccgtgatgcaggtattcgcaatactcctgccagccctgttcgtcgccgtacgcgtgggtaaaatcatgatgcatacgcaagaaatactcttcgttcaggcgctcaagacggatctcaaacggatcttctaccaccgcaatcgccgcctgagtcattcgctcgcgcaggcattccggcaggtgattcgaaccgatcatccggctttcgtcttccagcacccacaggcgcaaattctgacgggcgtcggtttttagcatttcggcagccagcaggttttcaaaactcgcctggctaagttgtggttgtaaggtgcgaccaaacgccgaaccgcgatgacgcgccagcccttccagatcaacaccgttcggctgttgttgcactaacagcgttttgccgcagccggtacaaccgccaatcagcactatcggtttttgtgccagttcaatagtcgcctgaatcgtggtctggcgcagtgccttataaccgccttccaccagcggataatcaatccccgctgcatgcaaccagctttgcacaatatgtgagcgctgaccgccacgggcgcagcagagaataccttgcggattttgcaggcacgctgcccgccaggcgtccatacgctgctgacgaatttcacccgccaccagtttatgacccagcgccagcgccgcgtctgacccttgctgtttataacaggtgccaacggcggcgcgttcatcgttattcattaacggcagattgatagcggcgggcattgcgccttgctcaaactcgataggggcgcgaacatcaataatgggcgtatcagcaatcagcagggcacgatagtcctgttccgtgtgtctctcttgcatagttaaaagtgaacctcaaatcagcttgcgcgctattttacgcgccaacgcgcaaggaaacttgatttttaactgcgtgggttgccgaaaatttctaaaaatccgctgatttccggcctgcgctgggtaaacaaggtcacaatatcttctaccgctttgccgctgccaaatttgcgccatgccagactcaatggcgaaggagggcgcatcgttgggattacccggctaactagttgttgattatcgatcattgactggcaaagcgattttggcaaaaaccaatgccaacgcccgcaagatgggcggcgattttcgtttccatatcaggaacaataatctctttttgcccaggcaatcgccaggcgacgcgtttggttaaggtgcgggcgctgtcttcaatattgaccgccggaaagcgccgcaactgcgcttctgttagcggctcttcaacgttcgccagcggatgatccgccgccatgacaaagcgccattgcaccgatcctaagggatcaagactaaaggtatttgccagcgcctcggttcccgtgacgccgatagccagtgaaaaaccttcgtataatagcgaatcccagacgcccatatagatttgtcgggagatgtgaaactgggtaaaggggtaacgttcattcagccacgccagcaactgggcgacggcctgggggtggtagagcaggttgttgatgacaatattcacctggcgttccacgccatcattcacctgttgcagctcgcttggcatactttccagccagctcagccagtctctggcctgggaaagtagatgctcgccagccgctgtcaacgtcacgctgcgagtcgtgcggaaaaacagcgctactccggtattctcttccagaagtttaatgcgataactgatcgtcgccgtggttttacataatcgttctgccgcttttgaaaaacttcctgtttcagcaaccgcaatgaaagtccgcaaggtttctggatcgaacatcttcaggtatccccttttaaatccgcaagttgcgtgattttcttatcctctgatttatcagtatttttacatgataaccctgttcaatttgtggactaaatctagttttggaaaaatattccaacttttgtattgatgttgttctcttaaggttttagattgcctgttattgaaaccaagctgaccggtcggcgatggttgaacggaattatgttacaaggacaaaaagatgaaacttcaggtattaccgttaagtcaggaagcctttagtgcttatggcgacgtaatcgaaactcagcaacgggattttttccatattaacaatggcctggtggagcgttaccacgatttggcgctggttgagattcttgagcaagaccgtacgcttatcagcattaaccgcgcgcaaccggcgaatctgccgctgaccatttacgaactcgaacgtcatccgctgggcactcaggcctttatcccgatgaaaggtgaagtgtttgtggtggtcgtggcgttaggcgacgacaaaccagacctgtcaacgctgcgggcgtttatcaccaacggcgaacagggagtgaattaccatcgtaacgtctggcatcacccacttttcgcctggcagcgcgtcaccgattttctgaccatcgatcgcggcggcagtgacaactgtgatgttgaaagtattcctgaacaggaactctgttttgcgtgacgcctgcaaccgacttgcataagataaactaattgttcattgtttatgctcacttgtaggtcggagttaacgtaggtatgacggaagttagacggcgcggcaggccaggacaggcggagcctgtggcacagaagggcgcacaggcgttagagcggggaattgcgattctgcaatatctggaaaaaagtgggggaagttcgtcggttagcgatatttctctcaatctggatttgccgctctccacgacctttcgcttgctgaaggttttacaggcagcggattttgtctatcaggacagtcaattaggctggtggcatataggattaggtgtctttaacgtcggtgcggcgtacatccataaccgcgatgtcctctccgtcgccgggccgtttatgcgccgcctgatgttactttccggcgaaacggtcaatgtcgcgatccgtaacggcaatgaagcagtattaattggtcagttagagtgtaaatcaatggtcaggatgtgtgcgccactgggcagtcgtctgccgctgcatgcttccggtgcgggcaaagcgctgctttatccgctggcggaagaggagttgatgagcatcattctgcaaaccggtttgcagcagtttacgccaactacgcttgtggatatgcccaccttgctgaaggacctggaacaagcgcgtgaactgggctataccgtagataaagaagagcatgttgtaggtctgaattgcatagcttcagcaatttacgatgatgtcggtagcgttgttgccgctatctccatctccgggccttcatcaagactgacagaagatcgttttgtcagtcagggtgagctggtcagagacaccgcccgcgatatcagcacggcgttgggactgaaagcacatccatagtgtctgtcgcatcccgctctgcggagcgggttttttgacaaaatttgaaagttggaaaatttttccaattaatagaggtaggaataaaatggcaaaaatgagagccgttgacgcggcaatgtatgtgctggagaaagaaggtatcaccaccgccttcggcgttccgggagctgcaatcaatccgttctactcagcgatgcgtaagcacggcggtattcgtcacattctggcgcgtcatgtggaaggtgcttcgcacatggcggaaggttatacccgcgcaacggcagggaatatcggcgtatgtctggggacttccggtcctgcgggcacggacatgatcaccgcgctctattctgcttctgctgattccattcctattctgtgtattactggccaggctccgcgcgcccgtctgcataaagaagatttccaggctgttgatatcgaagctatcgccaagccggtaagtaaaatggcggttacagtacgtgaagcggcgctggtgcctcgtgtgttgcaacaggcatttcacctgatgcgttctggtcgtccgggtccggtactggtggatttaccgttcgacgttcaggttgcggaaatcgagtttgatcctgatatgtacgaaccgctgccggtctacaaacctgctgccagccgtatgcagatcgaaaaagctgtagaaatgttaatccaggccgaacgtccggtgattgttgccgggggcggggtaattaatgctgacgcagctgcactgttacaacagtttgctgaactgaccagcgttccggtgatcccaacgctgatgggctggggctgtatcccggacgatcatgaactgatggccgggatggtgggtctgcaaaccgcgcatcgttacggtaacgcaacgttgctggcgtccgacatggtgtttggtatcggtaaccgttttgctaaccgtcataccggttcggtagagaaatacaccgaagggcgcaaaatcgttcatatcgatattgagccgacgcaaattggtcgcgtgctgtgtccggatctcggcattgtctctgatgctaaagcggcgctgacactgctggttgaagtggcgcaggagatgcaaaaagcgggtcgtctgccgtgtcgtaaagaatgggtcgccgactgccagcagcgcaaacgcactttgctgcgcaaaacccatttcgacaacgtgccggtgaaaccgcagcgcgtgtatgaagagatgaacaaagcctttggtcgcgatgtttgctatgtcaccaccattggtctgtcgcaaattgccgctgcgcaaatgctgcatgtctttaaagaccgccactggatcaactgtgggcaggcaggcccgctgggctggaccattccggcggcgctgggggtttgtgccgctgatccagagcgcaaagtggtggcgatttccggtgacttcgacttccagttcctgattgaagaattggccgttggcgcacagttcaacattccgtacatccatgtactggtcaataacgcttatctggggctgattcgccagtcgcagcgcgcgtttgatatggactactgcgtgcaactcgctttcgagaatatcaactccagtgaagtgaatggctacggtgttgaccacgtaaaagtagcggaaggtttaggttgtaaagcgattcgcgtcttcaaaccggaagatattgcgccagcctttgaacaggcgaaagccttaatggcgcaatatcgggtaccggtagtcgtggaagttattctcgagcgtgtgaccaatatttcgatgggcagcgaactggataacgtcatggaatttgaagatatcgccgataacgcagcggacgcaccgactgaaacctgcttcatgcactatgaataagggagataaataatgttacgtttctctgctaatttatcgatgttatttggagaatatgattttctcgcccgttttgagaaagctgcgcagtgtggttttcgcggcgttgaatttatgtttccttatgactacgacattgaagaattaaaacaggtgctggcgagtaataaactcgaacatacgctgcacaatttaccggcgggtgactgggcggcgggggagcgcggtattgcctgtattcctggccgtgaagaagagtttcgggatggcgtagcagcagcgattcgttatgcccgtgcgctgggtaataaaaaaattaactgtctggtcggtaaaacgccggctggtttcagcagtgaacagattcacgcaacgcttgtagaaaacctgcgttatgccgcgaatatgctgatgaaagaagatattttattactgattgaacctattaaccattttgatattcctggtttccatctcaccggaactcggcaggcgctgaaattgattgatgatgttggttgctgcaatttgaaaattcagtatgacatttatcacatgcagcggatggaaggtgaattaaccaacaccatgactcagtgggctgataaaattggtcacctgcaaattgccgataatccgcatcgcggcgaaccgggaaccggagaaattaattatgattatctctttaaggtaatcgaaaattctgactacaacggttgggttgggtgtgaatataaaccccaaaccaccacggaagccggtttacgctggatggatccgtaccgttaaaacgtaacgctattcagacaatgcttttttaggccgctaagttggcaggggatcgtgttgtctgaattcaggaaaagcgaaatttaaaagaggttaattatgaaactgggatttattggcttaggcattatgggtacaccgatggccattaatctggcgcgtgccggtcatcaattacatgtcacgaccattggaccggttgctgatgaattactgtcactgggtgccgtcagtgttgaaactgctcgccaggtaacggaagcatcggacatcatttttattatggtgccggacacacctcaggttgaagaagttctgttcggtgaaaatggttgtaccaaagcctcgctgaagggcaaaaccattgttgatatgagctccatttccccgattgaaactaagcgtttcgctcgtcaggtgaatgaactgggcggcgattatctcgatgcgccagtctccggcggtgaaatcggtgcgcgtgaagggacgttgtcgattatggttggcggtgatgaagcggtatttgaacgtgttaaaccgctgtttgaactgctcggtaaaaatatcaccctcgtgggcggtaacggcgacggtcaaacctgcaaagtggcaaatcagattattgtggcgctcaatattgaagcggtttctgaagccctgctatttgcttcaaaagccggtgcggacccggtacgtgtgcgccaggcgctgatgggcggctttgcttcctcacgtattctggaagttcatggcgagcgtatgattaaacgcacctttaatccgggcttcaaaatcgctctgcaccagaaagatctcaacctggcactgcaaagtgcgaaagcacttgcgctgaacctgccaaacactgcgacctgccaggagttatttaatacctgtgcggcaaacggtggcagccagttggatcactctgcgttagtgcaggcgctggaattaatggctaaccataaactggcctgatacccgcaataaaaatggccgatatcagaaaatgaatcggccagcaatattaaaaaagaaagcagccaaagatgttgcttcagtattaaaaataatatttttattttatttgttcctcatagctagattaaaacaacgttattcgatacgtgaaattaagagggatttatggaacatcagagaaaactattccagcaacgcggctatagcgaagatctattgccgaaaacgcaaagccagcggacctggaaaacatttaactattttaccttatggatgggttcggttcataacgttcccaattatgtgatggtcggcggcttttttattctcggcttgtctacctttagtattatgctggcaattatcctcagcgcctttttcattgccgcggtaatggtattaaacggcgctgcgggcagtaaatacggcgtaccgtttgccatgatcctgcgtgcttcttacggcgtacgtggcgcactgtttcccggattattaagaggcggtattgctgccattatgtggtttggcctgcaatgttacgcggggtcactggcctgcttgattctgattggcaaaatctggccgggatttttaactctcggtggtgatttcacgctgttagggctttctctaccgggcttaattactttcttactcttctggctggtcaacgttggtataggttttggcggtggcaaagttttaaataaattcactgccattcttaacccgtgcatctatatcgttttcggcggcatggcgatttgggcgatttcactggtcgggatcggtccaatctttgactacattccgagcggtattcagaaagcagaaaacagtggattcttgttcctggtggtgattaacgcggtagttgcggtctgggcggcaccggcggtgagcgcatccgactttacgcaaaacgcccactcgtttcgtgagcaggcgctggggcaaacgctgggtttagttgtggcctatattctgtttgcggtcgccggggtatgtattattgccggagccagtattcactacggcgctgatacctggaacgtgctggatattgttcagcgttgggacagcctgttcgcctcgttctttgcggtactggttattctgatgacgactatttccactaacgccaccggtaatattattccagccggttatcagattgccgccattgcaccgacaaaactgacctataaaaacggcgtactgattgccagtattatcagcttgctgatctgcccgtggaaattaatggaaaatcaggacagcatttatcttttcctcgatattatcggcggaatgcttggtccggtaattggtgtcatgatggcgcattattttgtggtgatgcgcggacaaattaatcttgatgaactgtataccgcacctggcgattataaatattacgataacggttttaacctcactgcgttttcagtaactctggtggccgttattttatctcttggcggtaagtttattcactttatggaaccgttatcgcgtgtttcatggtttgtcggcgtcatcgtcgcctttgcggcctacgccttattaaagaaacgtacaacagcagaaaaaacaggagagcaaaaaaccataggttaattaatcccgatattgaacattgagttaaaaaccaatctgtattttacaaggagtttgttatgtcttttgatttaatcattaaaaacggcaccgttattttagaaaacgaagctcgcgttgtagatatcgccgttaaaggcgggaaaattgctgctatcggtcaggatctgggcgatgcaaaagaagttatggatgcgtctggtctggtggtttcgccgggcatggttgatgcgcacacccatatttctgaaccgggtcgtagccactgggaaggttatgaaaccggtactcgcgcagcggcaaaaggtggtatcaccaccatgatcgaaatgccgctcaaccagctgcctgcaacggttgaccgcgcttcaattgaactgaagttcgatgccgctaaaggcaagctgactatcgatgcggcacaactcggtggcctggtgtcttacaacatcgaccgtctgcatgagctggatgaagtgggcgttgtcggcttcaaatgcttcgttgcgacctgtggcgatcgcggtatcgacaacgacttccgtgatgtaaacgactggcagttcttcaaaggtgcgcagaagctgggcgaactggggcagccggtgctggtgcactgcgaaaacgcgctgatctgtgacgcactgggcgaagaagcgaaacgtgaaggtcgcgtaactgcccatgactatgtggcttcgcgtccggtatttaccgaagtggaagcgattcgccgcgtgctgtatctggcgaaagttgccggttgccgtctgcacgtttgccatatcagcagcccggaaggcgttgaagaagtgactcgtgcacgtcaggaaggtcaggacgttacttgtgaatcctgcccgcattactttgtactggataccgatcagttcgaagaaatcggcactctggcgaagtgttcaccgccgatccgcgatctggaaaaccagaaaggcatgtgggaaaaactgtttaacggtgaaatcgactgcctggtttccgaccactcaccatgccctccggaaatgaaagccggcaacatcatggaagcatggggcggtattgccggtctgcaaaactgtatggacgtgatgttcgatgaagcggtacagaaacgcggaatgtctctgccaatgttcggcaaattaatggcgactaacgcagcagatattttcggtctgcagcaaaaaggccgtatcgccccaggaaaagatgccgacttcgtcttcattcagccgaatagcagctatgttcttaccaatgacgatctggaatatcgccacaaagtcagcccgtatgttggccgtaccattggcgcgcgtatcacgaaaaccatcttacgtggtgatgtgatttacgacattgaacagggcttccctgttgcgccgaaaggtcaatttatccttaaacatcagcagtaatctggcccctgcaatgcccgtccttgcggcgggcattctccggttaaggtgtgtttatgttcaattttgcagtgagccgcgaaagcctgttatcaggatttcagtggtttttctttattttttgcaacacggttgtggttcctcctacgctactttctgcttttcagttgccgcaaagtagcctgcttacgctcacgcaatatgcttttcttgctaccgcactggcctgcttcgctcaggcgttctgcggtcatcgtcgcgctattatggaagggccgggtggcctgtggtggggaaccatccttactatcacccttggcgaagcatcgcgcgggacaccgatcaacgatatcgctaccagcctggcggtggggattgcgctctccggcgtgctgacgatgttgattggttttagcggattaggccatcgcctggcacggttatttacgccgtcggtgatggtcttgtttatgttgatgctgggcgcgcagctgaccactatctttttcaaaggtatgctcgggctgccgtttggcatagccgacccaaatttaaaattcagttaccgccgttcgcgctctcggtggcggtgatgtgcctggtactggggatgattatcttcctgccgcaacgttttgcccgttatggcctgctggtcggcaccataaccggctggttgttgtggtacttttgctttccttcttcgcactcgctctccggtgagttgcactggcagtggttcccgctcggcagtggaggtgctttgtctccgggaattattctgacggcggtgattacaggtctggtgaatatcagcaatacctacggtgcgattcggggcacggatgttttttatccgcagcagggcgcggggaatacgcgttatcgtcgcagctttgtggcgaccggatttatgacgctgataaccgtaccgctggcggtaattccattttcaccgtttgtttcatccattggtttattaacccagactggcgattacacgcggcgttcatttatttatggcagcgttatttgccttctggtggcgctggttccggcactcacacgactgttttgcagtatccctttacccgtgagtagtgcggtcatgctggtttcttatctgcctttactcttttccgcgctggtgtttagccagcaaataacgtttaccgctcgcaatatttatcgactcgcattgccgttatttgtcggcatatttttaatggcattaccgcctgtgtatctgcaagaccttccattaacgctgcgtcctctgctcagtaacggcttactggtcgggattttactggctgttcttatggataatcttattccgtgggaacgcatcgaataatttgttgaaaaaggattgataatgaagattgtcattgcgccagactcttttaaagagagcttaagtgcagaaaaatgttgtcaggcaattaaagccgggttttcgaccctctttcccgatgcgaactatatctgtttgccgatagcggatggcggcgaagggacggtggatgcgatggtcgccgcgacgggcggcaacatcgtgacgcttgaagtctgcgggccgatgggcgaaaaagtgaatgctttttatggccttaccggcgacgggaaaacggcggtgattgagatggcggcagcaagtggcctgatgctggtcgcgcctgaaaagcgtaatccgttgctggcctccagttttggtacgggggagttaattcgtcatgcgctggataacggcattcgccatattattctcggcattggcggcagtgcgacggtcgacggtggtatgggcatggcgcaggcgctcggtgtgcgtttccttgatgccgacggtcaggtgctggtggctaacggcggtaatttagcgcgcgtggcaagcattgagatggatgaatgcgatccgcgtctggcgaattgccatattgaagtagcatgtgacgttgataacccgctggtaggggcacgcggcgcggcggcggtgtttggcccgcaaaaaggggcaacgccggaaatggtcgaagagctggaacaggggctgcaaaattacgcccgtgttttacaacagcaaactgaaatcaacgtctgccagatggcgggcggcggcgctgcgggcggtatgggtattgcggcggcggtatttctcaatgcggatattaaaccaggtattgagattgtgttgaatgcggtcaatcttgcgcaggcagtgcagggcgcagcactggtgattaccggggaagggcgcatcgactcgcaaacggcaggcggtaaagcgccgctgggtgtggcgtcggtggcgaagcagtttaatgtaccggtgattgggattgctggcgtattgggtgatggcgtggaagtggtgcaccagtacggcattgatgcggtattcagcattttgccacgtctggcacctttagccgaagtgctcgccagcggtgaaaccaatctcttcaacagcgcacgaaatattgcctgcgccattaaaataggtcagggaattaaaaactgacccttacctttaaagcggatgcgatttatatcgcatctttttttacctgaatttactacaaaaaaagccacggtataaaccgtggcaaaatccaacatagctaaaaataatcaggcgagtggtatgacttaaatctcgacgtcgcggttacaatctttcgagtaaatatagctgaacgcttcaccacgccctacgccataaccagcctgtaaagaataagcgcccataaagatgtaatcgccttttttcaccgggatccagttattgtcgaggttataaaccccctgaccggaaagaatataggcaccgtgttcctgaacatgtgtttcgatataaccgtggctggcacctggtgcaaaagagaggatatgcatgttcatatcaaaacctaactctttgggcagaaaatccagcaggatcacatcatccataccttcatagtgaatgcgttccagttcgctggcattgccagaaaccagccacggtgcatggccttctaccggaacatagcggcgcttatataaaaagatttggctgtcttcggcctgggcgttaacaaacgtcattaaggagcctggtgggcaataaagatagccaccttcgcttaaggcaaatgttttgccttcggctttggcagtgatatttccagagatcacatacaggaacgtttcaatgccttcgccaccgaagccctgttggttgccaccgttttgatgcagtgtgaccagataatcaacaaaagaggcacccagctttggcgtggagaggattgtcgcgtcacaattttcaaagcccggaataatattttttaccagaccatccggggttaacagtgcgaaattaccgtgtttaacaatcgcacggttagccagtaaatcatcgcggtaaccggtgacgttatttaaatatcccatttatgactccttatttctgccaggcaagttgataaagcatgagtgccaacgttttgaccccttcggcaaggtcggtaatattggtgcgttccgccgggttatggctgatcccgttgatgctgggaatgaaaatcatgcaggttggtacgcgaggcgcgaaaatttgcgcgtcgtgcccggcaccactgtgcatcacccggtaattcagtttttcactttcacacaattctgtcagggtggcgaccagctccttattcatcggcacgggttcttcgtccatccataaatcgatatcaataccaatgtccatttcatcgcaaatcgcccgcatgtcgttttctaactgttgggtgaaatcgcgcagcacggcagcgtcggtatgacgacaatcaatggtgaacgtggttttacccggcaccacatttaccgtattcgggcgcggctctactttgccaaaggtcagaaccagcggatcgcccatccttttcgctttttcgaccgactgatggcaaatgcgactgaaagcgtaaactgtatcacgacgataacccatcggcgtggtgcctgcatggtttgattcgccgttcagcgttaccgtataacgacgctgcccgacaattgcattcaccacgccaattgattgcccattactttccagcacacagccctgttcaatatgcagttcaacaaaggctttaatatcctgacgcggagttagtggggcgttcggaagagtaaatccgcaagccttcatcgcatcgacaaaactatttcctttggcatcacagatattccgcacgtcgtcaggattcgccagcccaaagatatttttactgccccagaagacatacgggaagcggctgccttcttcttctgccatcgccaccacttcgaccgtacgtagcggcgcgccgtattgcgttttcagccagtcaattgccagccacgccgccagcgcgccgaattgcccgtcgaggttaccgccgttaaccacggtatcgatatgcgaaccgctcagaatcacttcctgtggatattcggtaccattcaggcgaccgtataaattccctacttcatcgaaacgtgtttccagcccacttgctgccattctttttttaaattgctgctgggtttccagccattccggcgaataaagtaaacgggtcatcccacccgttgggtcagcgccaaaagaggaaagccagggtagcgtttcttctatggcttgacggaaatgtgtaatcataagaaagtcctgtctcaataattattgcgcaaagggatttttcgtttcgtatgacgtgttataaagcgcgtcggaaattaaatactggtaaatatcatcaacaatttcgatgccttcgacggcggctttgcgttgtttaatatcctgatcctgtccgggataataaacctgattaaaaccgggcgcgggggtaatggcatttaattcgcgcatggtctggctaagatgttgacggaataattcgctggaggagaaaaagttcggattaataactatatgtaattgccccaaattacgcccggcgtgtaaatcgtcatacatcgaactaacctgtcgcccgaacggtaagccgagtaagacgcctgagaggacgtcaatcatcatcatcaggccataccctttcggcccggcggcggggagcagagcatgtaccgcgagcggatcggttgttggtgctccgtttttatcgaccgcccaggtatccgggatagacatattacgcgagcgggcgtcgagcacttttccccatgcctgtacggtagtcgccatatcaaaggtaaggatctcgtcgccttctcccggcgcggcaaaggccagtgggttagtaccgtagtaaatttccgcgccgccaaacggcaccaccattggatcggactggcacatcgaaatgccaattaatccggcgcgggctgcctgctgcacaaaataagagattgcgccgctgtgacccatccggctgattccgaccaccgcaacgccattttgctcggcggttttgatggcatgttccatacccattttcgccgcgacctgtccggcggcattgtcggcatgtaaaattgccgagcacggcccggtttcctcaagacgaaactccggttcgcggttggtgccgccttttgaaatgcgttccgcgtagtattccacgcgcaccgcgccatgagagtggatccctctggcatcggcgtaaaccaatacttcagccacggttgcagcgtgctcacgttttaacccagcctggcagagtttattctcgattagctggtggagtgtttcccgactgattttcatctgtcttcctttttaacgacggtgtgaagcatgactgcaattaacatacagggaaaatatctggattatgtgatccagacaggcaaaaaaatatagttagaatttatttgataatccgctcacttttaacctgatttttaaaacaaccacgcttattaaaaaataatgcgtaatagcctggcggttatttgaattcttttgttaataatccctgtgtgatattcatcaccttatttacccgttgtcatcgataccgtaatcgccacattaacactgctcgtgcaattgccatgggtgcaatttttaaggagttgttatgatccacgcctttattaaaaaagggtgttttcaggattcggtcagtttaatgattatttcacgaaaactcagcgaatcagaaaatgttgatgatgtttccgtaatgatgggtacgcccgccaataaagcgttattagataccacagatttctggcatgacgattttaataacgccacgccgaacgatatttgcgtggcaattcgtagcgaagcggcggatgcggggatcgcgcaggcgattatgcagcagcttgaagaggcgctaaaacaactggcgcaggggtcaggcagcagcctggcgttgacgcaggtgcgtcgctgggacagcgcctgtcagaaattacccgatgccaatctggcgctgatttcagtggctggcgagtatgcggcggagctggcaaaccaggcgctggatcgcaacctcaacgtgatgatgttctccgataacgtcacgctggaagatgaaatccaacttaaaacccgcgcgcgggaaaaaggcttgctggtgatggggccggactgcggtacgtcgatgattgccggcacaccgctggcttttgctaacgtgatgccggaaggcaatattggcgtcattggcgcttccggtaccgggattcaggagctgtgttcgcagattgcgctggcaggggagggaattactcacgcgattggccttggcgggcgcgatctcagccgtgaagtgggcggcatcagtgcgctaacggcgctggaaatgttgagtgcagacgagaaaagcgaagtgctggcatttgtttcaaaaccacctgccgaagctgtgcgtctgaaaattgttaatgccatgaaagcaaccggcaaaccgacggtggcgctgtttttaggttataccccggcagtggcccgcgacgagaatgtctggtttgcctcctcgctggatgaggccgcacgcctggcttgcctgctttcacgcgttacggcgcgacgtaacgcaatagcgcctgtcagcagcggatttatttgcggtttgtataccggcggtacgctggctgccgaagcggcgggattacttgccggacaccttggcgtggaagccgacgatacccatcatcacggcatgatgctcgacgccgatggtcaccagattattgacctcggcgatgatttctacaccgtcgggcgtccccatccgatgatcgacccagccttacgcaaccagttaattgccgatctcggcgctaaaccgcaagtgcgcgtattgctgcttgatgtcgtgattggcttcggtgcgaccgccgatcctgccgcctcgctggtaagcgcttggcaaaaagcctgtgccgcgcgttcagacaatcaaccactgtatgccattgccacggtgacaggcactgaacgtgacccgcaatgccgctcgcagcaaatcgccacgctggaagatgcggggatcgcggtagtgagttcgctgccggaagccaccttgctggcggcggcactgattcgtccgctttcgcctgccactcagcaacacacaccgtcattaatggaaaacgtcgccgtgattaacatcggattgcgcagctttgcgctggagctacaaagcgccagcaaaccggttgtgcattaccaatggtcgccagtcgccggcggcaataaaaaactggctcgtttattagaacgtttgcaataaggggttcccatgtttacatcagtggcgcaagccaatgctgcggttatcgaacaaattcgtcgcgctcgtccacactggctggatgtgcaaccggcttcttcacttatcagcgaactaaacccgggcaaaacactgcttcacgccgggccgccaatgcgctggcaggagatgaccggacccatgaaaggggcgtgcgtgggcgcatgtctgttcgaaggttgggcgaaagatgaagcgcaggcgctggcaattctggagcagggggaagtgaacttcattccttgtcaccatgtgaatgccgtcgggccaatgggcggtattacttctgccagtatgccgatgctggtggtcgagaacgtgaccgacggcaaccgggcgtactgcaacctcaacgaaggtatcggcaaagtgatgcgttttggcgcttacggcgaagatgtcctgactcgccatcgctggatgcgcgatgtgttaatgccagtattaagcgcggcgctggggcgcatggagcacggtatcgatctcacggcgatgatggcgcagggcattaccatgggcgatgagttccatcaacgcaatattgcttcctcagcactgttaatgcgtgcgctggccccacaaattgctcgcctcgatcatgataaacagcacatcgcggaagtgatggatttcctcagcgtgaccgatcagttcttcctcaaccttgcgatggcttactgcaaggcggcgatggatgctggcgcgatgatccgcgcaggcagcatcgtcacggcaatgacccgcaacggcaatatgttcgggattcgggtaagcgggctgggcgaacgctggtttactgcgcctgtaaacactccgcaaggtctgtttttcaccggcttctcgcaggagcaggcgaacccggatatgggcgatagcgcgattaccgaaacctttggtattggaggtgcggcaatgatcgcagcgcctggcgtaacgcgctttgtcggtgcgggtggcatggaagcggccagagcggtatctgaagagatggcggaaatttaccttgagcgcaatatgcagttgcagatcccaggctgggattttcagggcgcgtgcctgggactggacattcgtcgcgtggtagaaaccggcattacgccactcatcaataccggtatcgcccataaagaggcggggatcgggcagattggcgcaggcactgtgcgggcaccgctggcgtgttttgaacaggcgctggaagcactggctgaaagcatggggattggttgaggaacgcgcaatgacgatcatccatcctctgcttgccagccgtagtgcaccgaattatcgccagtcctggcggttagcgggagtgtggcgacgggcgattaacctgatgacggaaagcggcgaactgttaacgctgcatcgtcagggtagtggtttcggccccggaggatggatgcttcgccgtgcgcaattcgatgcgttatgcggtggattatgcggcaatgaacgaccacaggttgtggctcaagggattcgcctcgggcgtttcacggttaaacagccacagcgttattgtttgctgcgtattacgccgcctgcgcatcctcaaccacttgcagctgcatggatgcaacgcgcggaggaaaccgggcttttcgggccactggcgttggcggcaagcgatccgctgcctgctgagttacgccagtttcgtcactgttttcaggccgcgctcaatggcgttaagaccgactggcggcactggctgggtaaaggccccggattaacgccgagtcatgatgacacgctgagcggaatgctgctggcggcctggtattatggcgctttagatgcgcgctccggtcgccagtttttgcctgttccgacaatctgcaactcgttaccacagcggtgagcgtcagttatttacgttatgccgcgcaaggatatttcgcctcgccactcctgcactttgttcatgctctgagttgcccgaaacgtaccgctgttgcgattgattcgctgctggcgctggggcatacgtcaggggcagatacactgctggggttctggcttggtcaacaattattacaaggaaaaccatgaaaacactggttgtagctcttgggggcaacgccttactccagcgcggtgaggcgctgacggcggaaaatcaatatcgcaatatcgccagtgctgtacccgcgctggcacgcctggcccgttcttatcggctggcgattgttcacggcaacgggccgcaggtggggctgctggcattgcagaatctggcgtggaaagaggtagaaccgtatccgctggatgtgctggtggcagaaagtcaggggatgattggctatatgctggcgcagagtttgagcgcacagccgcagatgccgcccgtgacgacggtgctgacgcgcattgaggtttcgcctgatgatccggcgtttttgcagccagagaaatttattggtccggtttatcagccagaagaacaagaggcactggaagcggcttacggctggcagatgaaacgtgatggtaaatatttgcgccgggtggtggcgtctccgcaaccgcgtaaaattctcgacagcgaagccatcgagttgttgctcaaagaggggcatgtggtgatttgcagtggcggcggcggtgtgcctgtgacggaagatggggcagggagtgaagcggtgattgataaagatctcgctgctgcgttgctcgctgagcagattaacgccgatgggctggtgatcctcactgatgctgatgcggtatatgaaaactggggaacgccgcagcaacgcgccattcgccatgccacaccggatgagttagcgccatttgccaaagccgatggttcgatggggccgaaggtaacggcggtgagtggttatgtcagaagccgtggtaaacccgcgtggattggggcgttatcgcgaattgaagagacgctggcgggcgaagcggggacctgtatttcgctgtagtcgtaggcattagacatttgtgcctgatgcgacgcttgacgcgtcttatcaggcctacaaccggtgccgcatccggcaattggtgcacaatgcctgatgcgatgcttgacgcatcttatcaggcctacaatgggtaccggatcggtaggccggataaggcgtttacgccgcatccggcaagaatagagcaccagttaaccgaacttactctgcgcccaaatcacgccgctggcatattccggcggcagcagcgggattaaggcttccagcgtcgcagtcagacgcgatgtgtcgctgtcggtcaaattcagatgccccactttacgccccggacggacttctttgtcgtaccagtgcagatgcaccagcggcagtttcagccagtcataattcacatcgctaccaatcaggttgatcatcaccgacggactattcactaccggttgcggtaacggcagatcggtaatcgcccgcagatgcagctcaaactggctgatgctggcaccgttttgtgtccagtgaccgctgttatgcacacgcggtgccagttcgttgatcagcagaccttgcggggtgacaaaacactccatcgccatcacgcccacatagcccagctcctgcataatcgccgacagcatctcttcggcttgcgcttgctgctgcgcattggcctgcggaaaagcgacgctggtgcgcaaaataccgtcctgatgcaggttatgcgtcagcggataaaacacggtgctgccatcaaatccgcgtgcgccaaccagcgacacttcaccagagaagttaatgccctgctcgacaatacattcgccgtaacactctgccggtaactgttcggtttcattggcacgtaaacgccattgaccgcgaccgtcatagccaccagtgcgacgcttaacaatcgccagttcacctaaacgctcaaacaccgcaggccactcgctgcgatcggcaagtaactgccacggtgcggtcggcaggtggagcttatcgaaaagctgcttctgagtcagacggtcggcaataatcgggaacacatcgcggttcacaaaggccggatgacgcgccagctcgcgggttaatgcggtttccggccagcgttcgatctcagcggtaatcacgctttgttgaaaaggcaccgccgccggttcagcgtccagcccgaccggccagacagcaatgcctaacggttcgcctgcctgacgcagcatacggcctaactgcccgttaccgaggacgcaaacctgtttcatgccgcacctcgcgggtccgggttttccagcacttcgtcggtctgggctttgcgccagtcattcagacgctggtgtagctctttatcgtgagtcgcgagaatttgtgctgccagtaatgccgcgtttgccgcgccagctttaccaatcgccagcgtacccaccggaatgccgcgcggcatttgtacgatggagtagaggctatcgacaccgctcagtgcggcgctctgtactggcacgcccagcaccggcaccagcgttttggcggcaatcatgcctggcaggtgcgctgcgccacctgcgcccgcaataatcacctgataaccgttctcttcggcgctttcggcgaagctgaacagtttatcgggggtgcggtgagcagaaaccacttcaacgtggtgcgggacattcaggatttcgaagatttcggcggcgaactgcatggtagcccagtcgcttttggaccccatcacgatggcgacacgcgccggattattgcgggaagacatgcgtcttaaaactcctgtggtgcacaactctcggctttagagggcacagagaatagcacggaaagagagcaaggaaaacggttgcgtggctgtgaaatcagcaaagttgtgggttttttaaaacggaaaatgaatcagctcaacgtcatccgccgtgactttcaccatcgaaccttccgtatgccaggcaccgagtaccacgcgaaaagcaggttgctggttggcgataagttcatgtaccgccgggcgatgggtatgtccgtggatcagccattgcacctgatgtttttccatcgcactgactaccgcgttttggttaacgtccatgatcgccagcgatttactgctgttggcttctttactgttcgctcgcattcgcgcggcaatgcgtttgcgcacaaacaacggcagggcgaggaatagcatttgcagccagggtttgtggactttggcgcgaaaagcctgataacccgcgtcatcggtgcacagcgtgtcgccatgcataatcaacacccggcgaccataaagttcgagcaccttttcttccggcaataatgtcatgccgctttcacgggcaaagcgtttgccgagcagaaaatcacggttgccatgaatgaaataacagggaacgccggaatcggacaccgctttgatcgctgccgccatctggcgatggagtgggttgggatcgtcgtcgccaatccatgcttcaaacagatcgccaagaatatacagcgcgtcggccttgcgggcttcccccgctaaaaaacgcagaaaaccggcggtgatcgccggttcttccacgcagagatgaagatctgcaataaagagtgtcgccacgattactcgctaacggtcacgctttcaatgataacgtcttcttttggcacgtcctggtgcataccgctacgaccggttgcaacacctttgattttgtctaccacgtccatgccgtcaaccacttcagcaaacacgcagtagccccaaccttgcaggctttcgccagagaagttcaggaagtcgttatcaaccacgttgatgaagaactgtgcagttgcagagtgcggagcctgagtacgtgccattgccagcgtaccacgggtatttttcaggccgttgttggcttcgtttttgatcggttctttggtggctttttgtttcatgcccggttcaaaaccgccgccctgaatcataaagccgttgataacacggtggaaaatggtgttgttgtaaaaaccttcgcggcagtagtccaggaagtttttaactgtttcaggtgctttatcgtcaaaagttttgatgacaatatcgccgtgattggtgtggaaagtaaccatttttgcatcctgttccgtttgattggtgcttcaacccagttcgggtcatatatagggtggtgttatagcataaccgcacgatcggatcatcacgcaatgtatgctgattcgcgcgggaaatatgggtattatacgcaactcaattacccacacatgtctaaacggaatcttcgatgctaaaaatcttcaatactctgacacgccaaaaagaggaatttaagcctattcacgccggggaagtcggcatgtatgtgtgtggaatcaccgtttacgatctctgtcatatcggtcacgggcgtacctttgttgcttttgacgtggttgcgcgctatctgcgtttcctcggctataaactgaagtatgtgcgcaacattaccgatatcgacgacaaaatcatcaaacgcgccaatgaaaatggcgaaagctttgtggcgctggtggatcgcatgatcgccgaaatgcacaaagattttgatgctttgaacattctgcgcccggatatggagccgcgcgcgacgcaccatatcgcagaaattattgaactcactgaacaactgatcgccaaaggtcacgcttatgtggcggacaacggcgacgtgatgttcgacgtcccgaccgatccgacatatggcgtgctgtcgcgtcaggatctcgaccagctgcaggcaggtgcgcgcgttgacgtggtcgacgacaaacgcaacccgatggacttcgttctgtggaagatgtcgaaagagggcgaaccgagctggccgtctccgtggggcgcgggccgtccaggctggcacattgaatgttcggcaatgaactgcaagcagctgggtaaccactttgatatccacggcggcggttcagacctgatgttcccgcaccacgagaacgaaatcgcgcagtccacctgtgcccatgatggccagtatgtgaactactggatgcactcggggatggtgatggttgaccgcgagaagatgtccaaatcgctgggtaacttctttaccgtgcgcgatgtgctgaaatactacgacgcggaaaccgtgcgttacttcctgatgtcgggccactatcgcagccagttgaactacagcgaagagaacctgaagcaggcgcgtgcggcgctggagcgtctctacactgcgctgcgcggcacagataaaaccgttgcgcctgccggtggcgaagcgtttgaagcgcgctttattgaagcgatggacgacgatttcaacaccccggaagcctattccgtactgtttgatatggcgcgtgaagtaaaccgtctgaaagcagaagatatggcagcggcgaatgcaatggcatctcacctgcgtaaactttccgctgtattgggcctgctggagcaagaaccggaagcgttcctgcaaagcggcgcgcaggcagacgacagcgaagtggctgagattgaagcgttaattcaacagcgtctggatgcccgtaaagcgaaagactgggcggcggcagatgcggcgcgtgaccgtcttaacgagatggggatcgtgctggaagatggcccgcaagggaccacctggcgtcgtaagtaattgcgctgttgccggatgcgagttttcgcatccggttatcgcctgcgccaccacaacattcccataagcaccatccccggcaaccacacccacatcaattcagaaattatcacctgatgcccgtacggcgtggtgtaacgagacaatgcaaacggcgcgactttaatcacctgccagggagcgaaaaagcgttcatctgaccacggccacagccagccaacgcccttaccgccagtggttaccgaatccagcaagctgtgcgatagcaacgagacggttaaaaacagccagcagcaaatcagcccagccctgaaccatcggcgtccaatcagcacacataacagcgggacaacaaacgcaaacaccagcgaatgggtaaaaccgcgatgaccaaaaacattgccgtaagcaacgccaaatttaaacgacaatacgtcggcgtcgggcagcatcgccaggatgattccggcaaataacagacgcggagggatgactttcgaacccaaccctaaaccaatgcataggggaacggcggcgtgcgtaataacggttggcatgatggtcgcttcggcaaaatgtcgatgctatcagcatggatgaacggggcgtagagggcaaaagtctgaaaagagaaccggcctgttgatacaggccgggaaagggatcaggcaacaacctgtacgctgtgacctgcaaaactcactgtctgaccggcgacgattttgcagcgtttgcgcgtttcaaccgcaccgtcgactttcacctggccttcggcaatcgcgattttcgcctgcgcgccgctttcgctccagccttccagtttcagcaagtcgcacagctcaacgtgcggatgtttacctaaagaaaatgtcgccatgttactcatcctgtggatcatgatattcaacgcacgcctgtagcgtgttttcaatcagcgtggcaaccgtcatcgggccaacgccgccgggaacaggcgtaatgtatgaggcgcgtttagccgcgtcttcaaacacgacgtcgcccacaactttgccattttccagacggttgatgccgacatcaatcacaattgcgccttctttgatccagtcaccgggaataaagcctggcttgccaacggcaacgatcaacagatcggcattttctacgtgatgacgcagatttttagtgaagcggtgagtcacggtagtggtgcaacctgcgagcaacagttccatgctcattgggcgaccgacgatattcgatgcgccaatcaccacggcgttgaggccgaaggtatcaatgttgtaacgctcaagcagcgtgacgataccgcgcggggtgcagggacgcagacgcggcgcgcgctggcacagacgaccgacgttgtaaggatggaaaccgtccacgtctttgtccggatgaatacgttccagcactttgacgttatcaatacccgccggtaacggcagttgaaccagaatgccatcgatggtgttgtcggcattcagcgcatcgataagctccaacagctccgcttcgctggtggtttccgggaggtcataagagcgggagacgaacccgacttcttcacaagccttgcgtttgcttgcgacataaatttgcgatgcagggttactacccaccagcacaacggccagtcctggtgcccgcagtccggctgcaatacgcgcctgaactttttgagcaacttcagagcgcacctgctgcgcaatcgttttaccgtcaataatctttgctgccatcagagagaggattccatctgttacgtaggtcgaaggggatgcgcctattttgtcagaagcggggcgcgctgtcaggtttcgtttcagatttatcgcgtgaagcgacctcttgcgaaggttaggcgcaccgtcgctgaggtcgctgagattgaaagcttcatttttcgtccatgatggcgttgtaaatctggaactgatttatttccttgtttaaggattaagataatttaagaaatacctgacaatataaaaagaattttcagcctggtgatttaccgcttcaggtctatatttgtgttgaatatattttgcgcggaagtattcatctaacggggctctctattttttagattagagtgcatattttcaattaagacattcttagaggataaaaaggaattttactactatcagtgacttaaataaagtaatcggttatatacggatgtggagtcgataaatgagattgaaggaatatatatgaaattaagatttatttcgtctgcgctggctgccgcactattcgccgctacgggtagttatgctgccgttgtagatggcggtacaattcactttgaaggcgaactggtgaatgctgcctgttcagtgaatactgactcggcagaccaggttgtcacactcggtcaatatcgtaccgatattttcaatgctgttggtaatacctctgcattaattccattcaccattcagttgaacgactgcgatcctgttgttgccgctaatgctgccgttgcattttctggtcaggctgatgcaatcaatgataatttattggccattgcatccagtaccaatacaacaacagcaacgggtgtcggtattgaaatacttgataatacatccgcaattctcaaacctgatgggaatagcttctcaaccaaccagaacttgatccccgggaccaacgttcttcatttttctgcacgttataaaggcaccggtacaagtgcatcagcagggcaagcaaatgctgacgcgacttttattatgagatacgaataatcaaaaccacgttgttttgaattatatatcacgtcttataacaaagtaatgtgccggttgtctgaagcggtatggtggcaatgtaaatcgaaatcatgttcactttgtatcatgccgctttattaaatgaaaagggaatgatgtgttgtaagaaaccaaagcaatcatttctttatatttcttatttttgccgtcaggaatacacaaggcgtattaactatgatgactaaaataaagttattgatgctcattatattttatttaatcatttcggccagcgcccatgctgccggagggatcgcattaggtgccacgcgtattatttatcccgctgatgctaaacagactgcggtatggattagaaatagccataccaatgagcgttttctggtcaattcgtggattgaaaacagcagcggtgtaaaagaaaagtcattcatcattacaccgccactgtttgttagtgaacccaaaagcgaaaatactttgcgtattatttacaccggtccaccgctggcagcagatcgtgagtctctgttctggatgaatgttaagacgatcccttcggtagataaaaatgcattgaacggcaggaatgttttgcaactggcgattttatcgcgcatgaaattatttctccgtccaattcaattacaagaattacccgcagaagcgccggacacactcaagttttcgcgatccggtaactatatcaatgttcataatccatcacctttttatgtcaccctcgttaacctgcaagtgggcagccaaaagttggggaatgctatggcggcacccagagttagttcacaaattcccttaccctcaggagtgcagggaaagctgaaatttcagaccgttaatgattatggttcagtaaccccggtcagagaagtgaacttaaactaaccgaatcatctgacaatatcagagctaattatgaaaatacccactactacggatattccgcagaggtatacctggtgtctggccggaatttgttattcatctcttgccattttaccctcctttttaagctatgcggaaagttatttcaacccggcatttttattagagaatggcacatccgttgctgatttatcgcgctttgagagaggtaatcatcaacctgcgggcgtgtatcgggtggatctctggcgtaatgatgagttcattggttcacaggatatcgtatttgaatcgacaacagaaaatacaggtgataaatcaggtgggttaatgccctgttttaaccaggtactccttgaacgaattggccttaatagcagtgcatttcccgagttagcccagcagcaaaacaataaatgcatcaatttactgaaagctgtacctgatgccacaattaactttgattttgcagcgatgcgcctgaacatcactattcctcagatagcgttgttgagtagcgctcacggttacattccgcctgaagagtgggatgaaggtattcctgctttactcctgaattataatttcaccggtaacagaggtaatggtaacgatagctatttttttagtgagctcagcgggattaatattggcccgtggcgtttacgcaacaatggttcctggaactattttcgcggaaatggatatcattcagagcagtggaataatattggcacctgggtacagcgcgccattattccgctgaaaagtgaactggtaatgggagacggcaatacaggaagtgatattttcgatggtgttggatttcgtggtatacggctttactcttccgataatatgtatcctgatagccagcaagggtttgccccaacggtacgtgggattgcccgtacggcggcccagctaacgattcggcaaaatggtttgattatctatcaaagctatgtttcccccggcgcttttgaaattacagatttgcacccgacatcttcaaatggcgatctggatgtcaccatcgacgagcgcgatggcaatcagcagaattacacaattccgtattcaacagtgccgattttacaacgcgaagggcgtttcaaatttgacctgacggcgggcgattttcgtagcggtaatagtcagcaatcatcacctttcttttttcagggcacggcactcggcggtttaccacaggaatttactgcctacggcgggacgcaattatctgccaattacaccgcctttttattaggactggggcgcaatctcggaaactggggggcagtgtcgctggatgtgacccatgcgcgcagtcagttagccgacgacagtcgtcatgagggggattccattcgcttcctctatgcgaaatcgatgaacaccttcggcaccaattttcagttaatgggttaccgctattcgacacaaggtttttatacccttgatgatgttgcgtatcgtcgaatggaggggtacgaatatgattacgattacgacggtgagcatcgggatgaaccgataatcgtgaattaccacaatttacgctttagccgtaaagaccgtttgcagttaaatatttcacaatcacttaatgactttggctcgctttatatctctggtacccatcaaaaatactggaatacttcggattcagatacctggtatcaggtggggtataccagcagctgggttggtatcagttattcactctcattttcgtggaatgaatctgtagggatccccgataacgaacgtattgtcggacttaatgtttcagtgcctttcaatgttctgaccaaacgtcgctacacccgggaaaatgcgctcgaccgcgcttatgcctcctttaacgccaaccgtaacagcaacgggcaaaatagctggctggcaggtgtaggtgggaccttactggaaggccacaacctgagttatcacgtaagccagggtgatacctcgaataatgggtatacgggcagcgccacggcaaactggcaggccacttacggtacgctgggggtcgggtataactacgaccgcgatcaacatgacgttaactggcagctgtctggcggtgtggtcgggcacgaaaatggcataacgctgagccagcctttaggggataccaatgttttgattaaagcgcctggcgcaggcggtgtacgcattgaaaatcaaactggcattttaaccgactggcgcggctatgcggtgatgccgtatgccacggtttatcggtataaccgtatcgcgcttgataccaatacgatggggaattccatcgatgttgaaaaaaatattagcagcgttgtgccgacgcaaggcgcgttggttcgtgccaattttgatacccgcataggcgtgcgggcgctcattaccgttacccagggcggaaaaccggtgccgtttggatcactggtacgggaaaacagtaccggaataaccagtatggtgggtgatgacgggcaagtttatttaagtggtgcgccattgtctggtgaattactggttcagtggggagacggcgcgaactcacgctgcattgcgcactatgtattgccgaagcaaagcttacagcaagccgtcactgttatttcggcagtttgcacacatcctggctcataaaggaaattatcaatgaagataatctgcagattattattggcgatggaatgtttgtgtctggcaaacatatcctgggctactgtttgtgcaaatagtactggcgtagcagaagatgaacactatgatctctcaaatatctttaatagcaccaataaccagccagggcagattgttgttttaccggaaaaatccggctgggtaggtgtgtcagcaatttgtccacccggcacgctggtgaattatacataccgtagttatgtcaccaactttattgttcaggaaactatcgataattataaatatatgcaattaaatgattatctattaggtgcggtgagtctggttgatagtgtgatggatattcagttccccccgcaaaattatattcggatgggaacagatcctaacgtttcacaaaaccttccattcggggtgatggattctcgtttaatatttcgtttaaaggttattcgtccctttattaacatggtggagatccccagacaggtgatgtttaccgtgtatgtgacatcaacgccttacgatccgttggttacacctgtttataccattagttttggtggccgggttgaagtaccgcaaaactgcgaattaaatgccgggcagattgttgaatttgattttggtgatatcggcgcatcgttatttagtgcggcagggccgggtaatcgacctgctggtgtcatgccgcaaaccaagagcattgcggtcaaatgtacgaatgttgctgcgcaggcttatttaacaatgcgtctggaagccagtgccgtttctggtcaggcgatggtgtcggacaatcaggatttaggttttattgtcgccgatcagaacgatacgccgatcacgcctaacgatctcaatagcgttattcctttccgtctggatgcagctgcggcagccaatgtcacacttcgcgcctggcctatcagtattaccggtcaaaaaccgaccgaagggccgtttagcgcgctggggtatttacgcgtcgattatcaatgaggtacggagaatgagaagagcactctttagctgtttctgcgggttactgtggatttccagtggatgggcagctgaccctttgggaacgattaatatcaatttgcacggtaacgttgttgatttctcctgtaccgtaaacactgcggatattgataagacggtagatttaggcagatggcctacgacacaattactgaacgctggcgataccacggcactcgtcccttttagcctgcggctggagggatgtcctccgggttcagttgcgattttatttacgggaacgccggcatccgataccaacctgctggctctggatgatcccgcaatggcgcaaaccatcgccatcgaattacgtaatagcgatcgctcccggctcgcactgggagcggcgagcccgactgaggaagtagatgcaaatggcaatgtcacactaaacttttttgccaattatcgagcgttagccagcggtgttcggccaggtgtggcgaaagcggatgcgatatttatgatcaattataattaatattatattaattcgtataatttggcgtagtcgataagctctacaattgaatgcaaacctagcttgccataaatattagatttatgcgcactaactgttttattgctaagtaataacttatcggcaatttctttattagataatccgctaaccagataacgtaatatggtcacttcacgattagatagcacagtgaccgttgaactattcgtactacatttattgctttttatatagttaagcgtttcgctgggaaaaaacgtgtatccggagaggatcatctgaacggcatgaaaaatatcattctgatcattgcatttactgacaaaaccgttagcaccagcttgtatcgctctgccagcataaaagcattctgatttcgatgataaaaataacactttcactgtgctctggatttgtttgatccttttcaggaaggtaaaaccgtctgttccgggcaagtctatatccataatgattaaatcaacaggacgggttcggagataatcgatggttatgcggtaatcatccgttttcaggacaatctgcaattcactgtttttttgcaacagaacttcaatagacattctgatgataggatgagtatccataatgatcaccgacgttggtttcatagttaccagtctcataggagcggacaattttccgttagggcggtaaattgtactttgatacatgaaaatacgggttttcttgattcagacgcgcagcggtgtgtgtttgtttgccgctatagcgaaataaatcagaaaatcagacgcggtcgttcacttgttcagcaaccagatcaaaagccattgactcagcaagggttgaccgtataattcacgcgattacaccgcattgcggtatcaacgcgcccttagctcagttggatagagcaacgaccttctaagtcgtgggccgcaggttcgaatcctgcagggcgcgccatttcttcttcatttatgccagtcttatccgtttccgctttgcccttcaccacatcactttttgtcgctgtttggcgagataattcaacggtgtcaggccgtaaaacgccttaaaaacagagataaagtatgacgtgctgctatagccacataattgcgccacctgagtgatatttttgttatccatcaataacatctgtacggcgtaacgcatacgacactctgtgacaatctggctatagctggtattttcgttttttaatttctttttgagcaggctggggcttaaacatagcgaactggcgacaattcgcagattccagtaatgctgaatatcgctttgaataatgcggcagacgctgtcgcggacgctgctgcgtaagatatacatcagtagggcaataaaccgcgattgctcaagaaagttagacaatacggtaaaaagcaatacgcgcgtcaactccgcttcgcagggtttgctgggttgctgcttgctgtggttggcggctagccggaacacttccggtgtacggctatgacaagcaataaccggggttgccagccgcgaccagggctttacacaggttaagttcttatttaaaaacaacagataatcgttgatgatgttacggttgatgtgggtgattaatacgtgatttaacgttgagagttcaatgacgttattgttgcacgcgaaggcggccaggtagtttttcggaagggtaaacgtagcatggttattgacgcttacctctacctctttttcggtcaggatcaccacgcaaggttcactgctgctcaattgcatttcgcactcctcagatatcagaaactccgctcaaaggatctatgcttcctgcatgagtgatcggcccgttcgccgataacgatcttctttctttagcacgctttttagcaattaatcttgatggaattctgacgagagcgaaagaggtaagccaggtcgtacccgacttacctggaggagatttaatactcgagaatgccgtgcgcgacgggcaaatagcgcagagagaaatagagagtgtctttaccgcaagaggaacgtttcgctaacagcgaggcaatttctgcgtccggtttcggtttcgctgtaaaggttttgcctttgccggcgacaaaaagttcataaacaatgccgcttgctggggcggaactttggcaatcggcgctggcttgtagataacgttcacgctgttcagcggtcagtttatccacgccgctgccatcctgtacccaaacattaacgccggttgctttaacgtgttccagcagttggcgatagccatcgggcgacatgtttccggcgaaaaaactactgatataaaccggttttgctgaaacatcgctaatcagccgctgcgcgttgtttaaccatgttagcaaaggctgatgggcagcttcgctgcgccagttcaggtcgtcaatttccgcgctgatgtaccagccatccggcgttatgccaggcgcggcgctccataatctggcttgctggagatcggcagccagcaggcgattaagatagctttccagcgctgcggacgactgtttctggtgcataaaaaattccggatcggcgttcagcccgacaatcagcttcaggccagcctgttgcgcagctgcggcacgcttaaacaataacgtgcgctgttctggctgggtaaatgcatcgccgtaacgggtccattgcaaaaccagggtatcgaagccttgcaaacgtaactgactcatcagcccctgccactgggtatcggtaacctgactatctcggttttgtggttgccagataatacctttcatcgcaaaggaaaaagggctgaccaaaagcagtgtcagcaatacgaaaatgaacttacgcatttaccagtgcactccaatggtgagaaacgcgttgttgcgctctccgttacgttgattaatcgccttaaaggtatgttgatactcgacgccgagactgactttgtgcggccaggcgtcgtagtgcgtctcgccggtccagatattccagcggaccccgactccgccaagctgcgcgccctgagtgcctttatcacgatagccgttgtcctgaacgtgagcgtaaggctcaatagtctgtccgttagctaccttctgatgccagctgacgcgataatctgccgtccacgcctgaatatcctggcggatatattgcgccgcatcgaggtacaggttttgggcaaaccagcctgaaccgttcgggtgccattcgtcgctgtatttgccgccattaaagaatgaggcgctggcgcgcagcatggtatcggatgcgccattttgcccgttcagcggcaactgctgttcgacggcgaggaaaaagatctgatcgcgcagcggcttccagcgcagaccggtgccggacatcggatttttcaccggcatcatcaccccgtttctccggtatcggcaaagacgcggctataaactgagagcaggtcgccttccagcagcatattgcgtccgatgcggtactcggcttccagttgcccgtagctacgatagcttttccctggcgctgcgccgccgacattattgttagcggtgctcattgccccggaacgcaagccgatagaagaatcgaaactgaacgtccagcggcgaccgacctcctcatgcaaacggcggaaattgaagcgttgctgattttgctctggggtcagtggggttatcagcgcctgattatcaatgtcatcaatcaccagccgggcgtagtgctgcgtcgcaggcatgtcatccagacgctggttcacgtaggccagttgtcggatcagtgccggatcgtccggaagccctttatgcgcctgttcgagcatttcccgcgactgtgcgatatcaccgctatcccacaaggcgtaaccaagcgctgcctggatgttgctattattcggttccagttccagcgcggcgcgcaaatcactcaccgccgccgggacattatgacgttggcgataaattgtcgcccgcgcaacgtaagcgttggcagaaggcgcaatattgattgagcgcgtgagatcgctcagtgcgagttccggctgaccaggaatgtaacgttgcgcatgcagccaccagtagagggcattgtttcccagtccacgttgttctgcctgttgtagccagcgatcgcgagctgcaccatttcctgccgcctgggcggtattggcagcagcaagcagatcctcattgctcatgtcgtgaagactgattttctgccaggccgccagtgcggtggcgtagtcctcaacctgatacgcctgataggctaccgcacgatgttgccaggcgttcggttgtcgttgttcggcctgaagccatgcatacagcgccacaccgggtagcgtgtcccgataacactttgccagacggttccaggcggcagcatcgtaggaaggcgacatatcgcccagcaagcgaactattgccgggcaattatctgcaatacccggcaactgactttgccactgacgttgctccgccagcggtaagggtttcgataaaatcgccaccttcgccggcgttgccaggtaaggatgactttccagcagagacgccagtcgcgccattaaagtctggctgacacgcgcatcgccctggaaaggatagcgttgcagcaataaatcggcagcttcgcgtgactgctcgttctgcatcagttgccaggtcagttgatccaggcgggtaagatttgccggttcttgctgatacagcaatcgtgccagacgcagagattcagccttgttacgggtcgccacgctgacagcataacgctcctcaagcatttcattggcggggagggtggcgagcagtttttgcgctgcgtcgtactgaccttcttttaacagcaccggtagcgtcgcgccaacaacatactggcggttatcggcaaactgcaccgtataattcgccaatgcctgaacggggttggcgctgtatttagataacagatagagccaacttttctcttgtgcgtccgtggtaaacagcggcttattttcattgagataatgctggaggcgtgctttttcgccacgataagccagcgcggtcgcgtaagtaatatatgactgaggatcggtgaagatcccctgtgattgcagtgccaggatccgatcgtccagctgcccggcaagaagcacgtcaaaccactgacggcgttctgccgcgcttaatgtgttctgctggcgtgcttcattgtatagcgtatctgcctgggaccattgtttcaggtagattgcccgttgcagcagatcggttcgcagcgtttttccttctggcgatgcagcaaacgtcgcatcgttcagttgcgctctggcgacaggtaattgtgccagccgcagggcattctgcccgacttcactgcgacaacgcagggtcggcgcagcgtcgcacgctttttgctgggcaagcagttcttcaacagtcgtaacgcttttcacttcaaccggaatagccgccagactgcgctcaagtcgggcatctcctgggtgacgtttcagttgatcctcaagcaacagccgcgcccggtcatcatgaccaaaatggcgataggcttccgcaaggtataaagtcagcggaatattatccggcacctgctggtgtatatattcaaattcgcggatggcggttgcttcgtcgttatttttctgtgccttcagcgccttatcgagacggggataaataacaaaatggcgataatcgctcagccccagctcttctgcgctggtgccgatattgtctgcgagtgcgctggtactcaataaagacgtcagcagtaaaccagaccatccgatgacgcgattaaggttattctccttcattttcggactccagttgcgcaacctgttctgtgtttaaacctgctttgagtaatagtgattgcatcgaaacttgtaattcgcgttgaattgtcaggacgcgatccaacgtttcctggctgataacgccttcggtgaccaaaaacttgccgagcggcagagaactgcgttcatggcgcaataacaacacgttaattgctgaacgattaatatgaccgagcgtggtcagtatttcggcgaacaggaactgatgcggcacatattgccgccagatttcaccggtctgctgttccgtgagccactgatgctgaaccgcattgtacaacattgcccgcggatcgtgaccgcgtcggcgtgcataccagtgacgtaaccccgtgacaatttgtccccgcagaacaatgacgtaacgcactttgcgtccgactttacgcgtcagggccgccagcgaaaccgggtcaataccatcttcactgccgacaattaactcatcattttccagacgcagcggcagtactgcataatgcagcgctacggaggctggcatttcggcaatcagcgaggacgggatctgccaggcatcgatggattcccacgccacgccgttttgctctgccagcgcctgtgccagctgctcggcgctaatcagcccctgcatcagcattgaaccgcccaggcgtagaccttcgacgcgattacgcagtgctgtatcgagttgttcttcagtgatgacctgattttccagcagaatttggcctaacgggcgcaacgagcgggtatcgccagtcacgctggggaagtcatgcgttgttttatcccacgcgacgcgacgtggatcgccgtgttgaagtacctgttttagcgcgcgccagttggccatgaagttaatcaggttgccccagaaaagacgcaggacagatagcagcccctgcgtcagaccgtagtagccagtgacgaaaatcacccgctgcacgatgcggttaaccatcaagccaaagtttagccacagcagggtcattaaccatgcgctgccgctaaaaatagaaaggaaatgccaggcatcgggccacaaactttcatacgccagcaacagcaaaagctggagcatcaccagcatcgcgaggaagctgacaaagttactgattgcccctttgcggtcgcggcagagaaagtagttcagcgtcaggctggaggtccatttgtgggttttaaagccctggaaaacaatgccgatgatccagcgagatttttgtcgaactgcagtcgaaaaggtatcggggaaatattcgcgcacgcagatcatgtttgacgtccgtgcgtgctgtaaaaatttacgctgctcgcgttctttggcttcgtccaccaccggaaaacggacaaaaatttccgtcatacctttctctttcaggcggaaaccaatgtcgtaatcttcagtcagactctgcacgtcgaaagcaataccgtcaccgtcagctaacagagcggtcacggcgcggcggctgaaacaggtgccgacgcctgcgctgggcacttgtccggcgagggcttcacgcaccggaacatctttgccatgcagctctgaaaactcatcaatgtaagtcatgctggtgaagtgcgtccattcgcgttcgaacggatacaccgggatctgaatcagatctttacgctcgaccagatagttgaacagacgcaattccatcggtgaaatcacatcttcggcgtcatgcagaataaaaccagcaaaagcgaaattggcgctacgttcaaactgggtgatggcgtccagcacgttgttcagacagtcggctttgctggtgggaccaggacgcgcgcagactaccttatgcacgttcggaaagcgagcgcacacttcgtcaacatcacgttgagtatcggggtcgttggggtaggtgccaacaaagatatgatagttttcgtagtcgagcgtggtcgccgccagctcggccatattgccgatgacgcccgtttcattccacgccggaaccataatcgctaacggtttttcatctggtttatacagttcgcggtaactcattcgcgggtagcggcgataaacactcaacttgcgtttaatgcggcgtacccagtagacgacatcaataaaaaaatcgtccagcccgctgatgaacatgatgaccgctaacgttatcgcgattacttttaagccgtagagccaggttgcaaaaacatcaagaagccagtccacacaaaaaccttacattaacgctggttatgtttagggtggcgtatattaaggttttttatgaattgtgacagctttttaccattaataggtatgactattgcggcacgttatttttacactggttataaaagttgccgtttgcgtagaatgtagacaaaagcgtggtgtcaaggaggggaggttaacgtcatagtgaagaggagtggtggcaccgatcaggtcatcatgtagtggaagtgcctggaggaaatgagcaggcagggcaagattacgaaagcccgctccccgcaaggactgacgccagatagtttctgtccatggctgcttttcgcatcttacgtcttaaccctgccttgaataccttatcattcgtcaaaatattaatagcgatgtgccgtatccctgaaaataattctgctgcatttcctcttcttattttgcagtcgtcttcattcattaccacgtccagacgccagtgcagcttattctccacgtgccagtggtttcggattgctgtggcgaacttctctgcggttaaatcagcagaactgatataatatctgaccgtcatttctggctccttcttttgttctgctattatggaccgaaaggagactgccacgcataatttcttcagccctttccattcaaacgtgaaatcaataagttcatcaaggacatcgcaaacaatatgaagacggatttcttctctgccgtgactcttttcactaattgcgtaactgtcatgctctggattatttaattctttcagcggaaatttttcctcaaaggctttatttagccgcccctggtttccttttaccgcgaataaataatcacctccctgtttttgtatcttctctgcaatatctttctggcaacccatcgcatcagttgtgatgatttttcctttaatatccagcatgttaagaagttctgggatagctgtaatctcattagatttctcatccgtcttgatctgtccgatgaccagactgtgcattgttgagaacgcactaatgacatgaatcgctcccctgcggcgactcttgtcataagagtgccggagcgtttttccatcaattgcaatgacgtctttatcatttgatgaatggcagtcacgcatccagttaataaagcactcatgaaattttgcaggactgatacaggatacaactctggcaatagtatcgtgaacaggaataccattttcaaaatcaccatattgcttcaagaaatcgagatgtgtttccccgaaatcctctatatcttcccaactttctgcaccagaaataacggcgcaaatagtcaacagtagaatatccgataatttatgttccactttccaggcttgtctgtaatcgggaataatagaaatatgttccatcaattttttaagttccattttgttctccttaattatgtaaggagtatttgatcatgtataagcaataaaaaacagcttcaggtaatgaggaatatctcaatttttaaacataaaatgtgaattatttagtacaaaaagtgtacttctgatgatctttccctgtatacatccggtctgcggggctgtgtgccaggcggtcatcgtcggtatcgccggtcacctggtggcgcagacgcattcccggaaaggcgtcataaaagaagcggcagctcagggcatcacggtcgaacagcaccaggtaatcatcgcggcggcgcaggatgtactgggcgtgatacgggttactggtttcgatattggctaacatccgctgttttattaatgcgatatctaaaatcaggatggaaatagtgatgtatatcactatttccatgatcttgccttgcgttcatccaggcaggaatatccctgttagcagcctctgtgcgatgtacgccagcggtctgtaaagaaaccgattaccttataacaaaacctctaacgtagtttataatacatcaggaatattaataaaaccttctgggtcagatatctcaataaatatcatatcaggctcaaaagtttcagggacttttaatttcgctgaaattaaccaaccttgcttagaaccaatactaatagatttatagctgtaattggcatgtagactatttttaatataaggaatttcccttaactctaactcacgccgagccaagtcaagagccatttcgatagttattttgttatgttttatcaatttgttagtcccatcatgaatttttctctcaatccctcaacatattttatggcatgagctatttccgcttcattgaataaatttttactttttaatatttcatttagaacgtgttcctccctagataaacgtcctagtgcttcgtatgcttctcgtccaattttcgcaaattgcttagcatgaatcacttcatgatacacctcatataaggtagcatttttcctaagataaatattgcgaaggccataatcaaaagctgccctagcatttggtggcaaatatttatctgctttccttattactttaattcctagcttctccatttctttagcaatattgtttatttgactacgtgataaacgaaccccatccaggaaacccgtatgcccactaacacgacgaccatcgccaatatagtccatcaaactgctgattttagaacttgcagccaatcccagcggatcaacccacccacaaggattcggcacataccggtaagtctgctccccgcccagcaaccccagcggatcactcaccaggtacattccggtttccggctcgtaataccggaaccggttatagcacagccctgattccgcatcctgccactgtcctgcatacagcaggccggggtcggcttccgggtccagttccccgcgcgggtccgggtagccggtgtctgcgggcagactgagtgccagcccccacaggctggtctgccccggtcgccagacggttttaccttcactgttaaagagcatcagcgggcggcccgtcaggtcgctcaccgcgtgattcgtccgcgtcacccactgcggggccacggacgggtgcggctgccgtacccggctgaactgctggcttatcagctcaaagccgttaaacaccaggtgccttacgctgtacagtttatcatcgcggtattcccggatttccgcaatactgtcgccatcccacaggtacgtaaaacggattttcttccggtcgcagcgtttctctgttcgtctgccgctggcgtcgtggcggtattcccactgctcaccctgtgcgctgcaatacccggtcagctggtcacggctgtcccaccggaaccgctctgtttccgggcgatagccgtcacggtgttttgtccggctgaccatccggcctgcggcgtcatagtcatactgcgtgtttccggcctgtttcagccggtggcctccggcataccgctcagtctcttcacttatccggtgcctgcccgcagactgcgccttcaggtagccacaactgtcatagccataggactcatcgccttcgccatagcccagcccggtgcctgaggctgtcaccgccgtgacctggccgttccggtccagccggtattcccgccgcgtttcccgtccgtaatcttcccggctggtgacgcctgacacattacccgcgctgtcgtaacggtactcccgtaccagtgaggggagcagcccgccccatgtggcttctgccgggaaaagtccggcgcgctggctggtaagctgaccggctgcattccagccctgttcacaggcaaaaccccggttactgtgccggagcacttcacgtcccgcctcatcacggctgaacgtcagcgtctcatcccccggcaggataacctccgtcagttctccggcggcgttgtaacggtaggtggttttcagcagggattcatcgggatgtctgtcgcgttcatcttccggtggcaggatacagcggatgacggtgtgttcgtcggggtagtggtattcaatggtccgtcggccctgagtggtgacattcacccgcccgcgttcgtcatagccggtgcgctgtgatatgccgtccgggctgaagatacccgtcagcctgccggatttgtcatacgcatactgcgttttgccttccggcgtgatgatttctgccaggcggcctgcggcgtcccggctgtagaggatggtttcctccagaccgttgaccctggcggtacagaggccatcggcgtcatagcggtaacgccagaccacgccgccccagtcacgctcttccgtcacccgtccacagttgtccagaatataacggtatgactcgccctgcggattgatgacttctgtcagttgcagcgtgtctttatcgtagcggtactgccagcggtggccttcaccgtccgttcgcgccaccggcaaatcgaacgggccgtattccatcgtccagacaacgccgttgccgtccgtccaggccagcaggttgccgtggcggtcgtagctgaacccttccgcgccggttccagcacgttcaatgccactcagtttatggtgctgctgccactgtaaccgcactgactgaccgccggggccgcgcatcttcaccggcaggtcgtgaccgctgtattcggtgtggtgttcacggcccatcacgtcggtgagtgtttccggccggttgtggtggtcgtactctatgcccagacgccgttcatcctggcggaatatccccgacagcagcccctgagcggtgtatgccagccgggtctcttcgccctgtggcgacaccagacttaccggcaggccgcgttcatcacactgctgtgtccacgtctgccggctgggtcggtgatgttgctgagcaggccgcgctcatcatagcggtacagccactccgcgccgtctgccgccgtgtaacggcttaactgaccgagtgcggcgttgtattcaaacttctccacccgcccggcaggggagtgacgggccagcaggtgatggaattcatcccattcatacgtggtggtgctgccgtccggcgctgcttcccgcagaatattgccgtcaggatcatagtaataacggtgagtgcccttgccgtccgtcacggtggtgcagccgtcaccatagtccagcgtggcgttgtaatagccctccgccccggtgacggtcacgcaccggccctgtgcatcgtaggtgaaacggctccacgtctggtcgttatcggaccagcggatgatccggtccgcagcgtcgtactcataaaacaggtggtagtccagccgcgcatccgcttctgtcagccgccccgcgcatcctgttcgtaggtcgccagcgtctgtatgccgttatccgtgcggtgaatggctttcaggtagccgctggcgtggtacgtcagtttaagccggatcccgtcggtgtgactgacacccgtgatccggtactggctgtcgcgctcaaacgtgatgcggttgctggcggtgtcgctcatcccgcccagcatgtacatccggtcattggggctgtgtgccaggcggtcatcgctggtatcgtcagtcaccgggtggcgcagacgcattcccggaaaggcgtcataaaagaagcggctgctcagtgcatccctgtcgaacagctccagataatcatcgcggcggcgcagaatgtactgggcgtgatacgggttaaccgtcgtatcactgtcaccgtcgaaggcaaatctcagcgtggctccctggctgatgatatccacccggtttccctgttcacgcacccaggcgtattcgctccaggagtcgctccagcccacgcccgtcaggccatgcagcggcagtacagaactgtggaaacgggtgaaggagagggggagggtctggcccagggtgaagtcggtacgttcgtcgcagtatgcgccggttaccggatcgacaggatctgttacccatctgatgactttattggcaatactttttaacgacttacctgttttccccagcaacgcgccgagctttgcgcccagcagcttcccgcttttccccagcaggtttcccagtttgccgagtctcgccagattcttcagttttcccagcagtcccgcaggcggcagaagatagctggctatcgttattccccccaggatcattctctgccacggcgggaactccggctggatatccagataggtcacctgttcaccgccaataaagacgtccggcgaacctcccacgatcgccgcactgcactccagtttgtcccctttgcgtgcggcaggctgattgttgataaagacgttgctgctgccctgggctatcctcggtggtttgttctccttgtcgcagagcgccgtgtcctcaccggcttccggggaaatccacctcttttttgatttcgccacgcccgcccaccatggtggcaaactccattaataccggaccggcgggaaacagaagcgatgcgccggcgctgacgcgatccataaaaccggcattgctgtccgtcagggtgataacagcgttcccccaggccttcgccagtggtactgctttttccgctgccgattcaagcaggtcagtggcaatatcaccccatgagggttccccctgtgggacttcaggtattgctccaggtgggggaggagggggaagggtgaccgctgcacgtgcggccagctcgccgttaatttttacgttttcagaaccggtattgatggcgccgtccgtgtcacaaaagctgtttatccatgattcaagctggttctgtttctcctccacataatcactcgccttatagctggcatacatcagcgcaggcaccagaaccagcgcataagggccggtggcacaggcggccataatcaggcaaccttctgcgatggtcactatcgcccccagcacggcccctgccagcgcccccaaaaaactcttgtgctgaatttcatcgcccagcctggcggcgggggggccggacttttttgatgccaacatctgtgcaatggctttgtcgttggctgcccgtttcatctggctggcgaccatcgcctgctgtgacagcattcgcattgccagcgtaccgcctgcggtcgctccctgtggcccgcctggtccttcactcatgtgttatccctcgtttatgtcagcgcggctggtccttttggatgtcattctccggtggcaacggggtgaagctctttatcacctccagcagcatcgtcttttgactgttcttcagggataaggaggtgctgaaagtgaaggtcagcagcgtatctccacgccgctggaatacggctatctggctaatccgcccctgattcccctcatcttccggaccgttccaggaataatccagcagccaggccggggcctctgccagagtgatttcccggcaggcatgttcggtgtacccatcaagtttgccctggtacagcgccagcgtttcctggtacagctctggtgtcagggttccctgtggaacggcttcgcgggtaatgaccaggttgatgccactgttatctgtggacaccaggacctgcattgactgatcctgccattgagacggcagttgaatgtggccttcattaaaagtgaactgcataaaatactccctgataatctgagtgaatcagttgatgaaaacagaaccgcccacgatggtgatgccatccttcgacagcctgattaccgtcgattccccgacctgtagctgaatgccatccggcgtcagcgcaattttgctttcctccacggccagcaaaatttccttaatcgccgtataagcctgtataccgtcgccttcgccaccattgtttacagcgtcaacatgcaccgaaccggcaatcgtgcctctgtcctgaaagacatcctcagataaagaccctttcagtactccggtgatcttgtggcctttttctaccgtaagaaggcggttaccttcctggatcgtgaccgtctggtcattttttacggtttcgcggtgatcgtgttttacggtggtggtacggtcgttgagcacttcggtatccatgttcttctgcgcgtggatgtagacctgttctctccctgtcgcatcatcaaacttcagctcattaaatccgctgcccatgtacgttttggagcggatggtcatctgcgtctttgttcccggcaggctgccgggggggcggttttcctggtggtaggtgcgccccataatgatcggctggtccggatcgccgttgaggaagtctacaatcacctcctgacccacacgcggtatcgccaggtggccaaaaccggtgcctgcccacgcctgtgccacacggatccagcacgaactgtcttggtctgccgggttataacggtcccagttgaacttcacccgcacgcgaccatgttcgtcgcagaagatttcctcgcctgccggtcctgtcacgacagcgctctgcgggccgtccaccagcggtttcagcaacggctgtggtcgccatgttctgtctgccgggatcaccgcaaagtgattattcagcgtggtgcctgaaccactgcgtcccggcaccgcctgtggctgttcgccgtgcagttcacttgccaccacctgccattcccggttcaggttcgcctgcggatgccccgtcagcacaattcgccgtcccggccatatctccggcgagcggctcattccccgcgcggtttctgcgttgtttcgccagccgtccatctgccagcgggcaaagttctgcccgtgggcgctcttgaaacgtccggggtagtcatacacttcatactgcgtgcgctggtagtcctggtgctggccttcctgttcaaaacgtccggcccagccggggcgtttaaaggtgtagtctttggtcaccacggaagaagggcggatttgtgcgctgtagcggaactggctgatgcagagggtgctcacctcggtacgggtgttcgggttccatgggatttcaaaagattcgggcagatggcggactgtgtcgcacagcaccaggctctggtcggtacttttgtaagcatgctcctcataaaagaagatgccttcctccgccgccatccggcacaggaaatcgtaatcagtctcaccgtactggacacaaaactcacgggaaggatgcggctcgctgaacagcggactccattcggtcaccccgttttcctgcaacatcgtgccgaggatgcttttgatgtcctcgttctggaagatacggaagttctggcgcagaccggcacgccacagcggcgggtgcaccttcatgctgtacagcatctggtttttgtcgttctccccgagttcaaaccaggtcaccacgcctttcacccggcgctgtacttcatcgccctgccatatcgtcaggtaggccattttgtccagcacctgcgcaaattcaagggagagaaactgctggctgaccagggagagatcgagggaaaagagcgaagagagtgactggttcagatgaaaggaaaccaccgcaaaagcatccggcggcaggccgtccacttccagtgtgaaacgtaatccggttgacatagcaacctccagtaaaatgaataatgatccgtaccgtacaactgcggataatgtgataagcgggacgacttcagacgttattagggaaggaacagaaaatgctatggttatgtgagaattttgtttaaatattactttacagaaacgggtgtctgttcagtcaaaaaataatcacaagctcaacctcttgtttcttggcgttattcaggacaggtacgcatatcacaacgagtaacaaaaacgcaaagttaaaccaatattcataatatatttttattcacagcaataaataatccaattaacattattaaaatgaatgattgcataagaaatatatgctaccgctccaccctgataacatgatctgcacattgcacatcttaacgttgttaaatactggctcaatagtggatattttaaattagggatttatcaaattcacttgataaatagattgagtgaataatataacaattaatgatgattaatcgcgattaaattattcattgctttatatgatagatggcttgtttataacgatgaaaatttagaaagggcattgtgatctacaattggaagaaacacagatttaactaagtttcatatacaaacatctcgtgaaactttgaaaaataaaagccttcgatatttcatatgtttaataagtttttctctaatttgttgatcaacaataccaggaggtgatgcaccacgccctgaatttgaacttaataatcactctctctccggcagcataatcacaaaccttgtcccccgcgcatctgacgttaccgcaaccgtgcctttatgcgcgacaacaatcgatttcactatcgccagcccaataccgctaccttcaccttttcgctggcgggaagggtcaacgcgatagaaacggtcaaacaatcgcggtaagtgctcgggcgcaatgggcgtaccggggttttcgacggaaacttgcacctgatgattgaccgtctggcagcgcactacaatagcctcactgggtggcgtataacgcagggcattagaaagcaggttgcttaacgcccgacgcagcatcagcggatcgcccgcaacctgacatttgtcgccaacaaaccgcaactccacgccgcgatcttccgctaacgcctcgaaaaaatcgaacactttgccgacttcatccgccaggttgagcattttcttttcggggattagctggttgttatcggcctgagcgagaaacagcatatcgctgaccattttcgccattcgcgtcagctcttcgagattagagtagagcacatcttccagttccttctggctgcgcgactggctgagggcgatttccgtttgcgttatgagattagtaattggtgtgcgaatttcgtgagcgatatccgctgagaaattggactggcgggtaaagacatcctcaatacgctcgatcatatggttgaacgacagtaccagctgttccagctcaatgggcacggtctgcgggtcgaggcgaacgtcgagatctttcgaggtaatattctggatttgacggctgacgctgcggatcggcgcgtgacctttatgtaccgccaatagcacgataaagacgatcaggatgctgatgatcgatgcggtcataataagtttattcatcaaatcatttatgtaatgaagatgaaaatcgatcgaaagcgcgatgtagagcgtataaatcggtttgccgtccaccaacgggccaaccgacaagttaatcatccgccagttgctgtgttccatatgcccgtgaccatgccctggcatcataatcgtcgggccggaaaggagatacacctcgccgccccgcgcgtctttatcgggtatggcgtcacgcgtaaactcgcggatatccggcgcaccgggggagtgatacaccgttttaccatggctatctgccagggagatcaacacgttggaataaccactgacgatatcttccagcgtcattaagcgtcgggcttgcgtctcgtcaggatgattaagtacccgttcaagcgtggcgctaatttcttttaaatcattaatatcctgctcggcaaaatgcacttttactgagtggatcatgatccatgcaaaggcgaaaacgctgcgatggtggccaggctgataaaaaaggtcaggcgggttgccagcgaaaacgggcgctgaaatggcttactgaccatccggcacctcaagcatgtaacccacgccgcgcacggtctgaattagctttggctcaaagtcgttgtcgattttgccgcgcagccgcttcaccgctacatcaatggcgttagtgtcgctgtcgaaattcatgtcccacacctgcgaggcgataagcgagcggggcagcacttcgccctgatggcggaggaaaaactccagcagagtaaactctttactggtcagagtgatgcgcgtgccgctgcgggtgactttgcggctgacgagatcgaccatcagatcggcaacctgaaactgactttcgataatcaccgccgccccgcgccgcaggagagtgcgcacccgcgccagcagttcagcaaaagcgaacggcttcaccagatagtcatccgcccccaactccagccccttgacgcgatgttcaatggtgccaagcgcggtaagcaacagaatcggcatccctttattggcggaacgcaacatgcgcacgatatcccagccgttcacgtccggcagcataatatcgaggattatcagatcataatcaccggtcatcgccagatggtagccattcaacccgttgtcggccaaatcgaccacaaaaccggcttcggttaaccctttggtcaagtattctccggttttcttttcatcttcgacaatcaacagtttcatatttcctccgcatgttgcccgggcaattctagagtagcgggatcagatggcaatcgcttattggcaaaatgacaattttgtcatttttctgtcaccggaaaatcagagcctggcgagtaaagttggcggcataaaatcaccagaaattatgagcctatgtctccttgtaaacttctgccattttgtgtggcccttgcgctaaccggttgttcactggcaccggattatcagcgtccggcaatgcccgtgccgcagcagttctcactcagccagaacggcctggttaacgcagcagataactatcagaacgcgggctggcgcaccttttttgttgataatcaggtgaagacgctgattagcgaggcgctggtgaataaccgggatttgcgcatggcgacgctgaaagtgcaggaggcacgggcgcaatatcgtctgaccgatgccgaccgctacccacagctcaatggcgagggcagcggcagctggagcggtaatcttaaagggaataccgccacgacacgggagttttcgaccggccttaacgccagctttgacctcgattttttcggtcgcttaaagaacatgagcgaagccgagcgacaaaattatttagccactgaggaagctcagcgcgcggtgcatattctgctggtttctaatgtcgcgcaaagctatttcaatcagcaactggcgtatgcgcaattgcaaatagccgaagaaacgctgcgtaattatcagcagtcatatgcgtttgtcgaaaaacaactgttgacaggtagcagcaatgttctggcgctggaacaggctcgcggggtgatagaaagtacccgcagtgacatcgctaaacgtcagggggaactggcgcaggcgaataatgcattgcaactgttattgggaagctacggcaagctgccgcaagcgcagacagtaaacagcgacagcctgcaaagcgttaaattaccggcgggcttgtcgtcgcaaatcttattgcagcgcccggatattatggaagctgaacacgcgttaatggcggctaatgccaatattggggccgcacgcgcggcatttttcccatctataagcctgaccagcggaatatcaaccgccagcagcgatctgtcgtcattatttaacgccagcagcgggatgtggaattttattcctaaaattgagatccccatttttaatgccggacgcaaccaggccaatctggatatcgccgaaattcgccagcagcagtcggtagtgaattatgaacagaaaatccagaacgcctttaaagaagtggcagatgcgctggcattacgtcaaagcctgaacgatcaaatcagcgcccagcagcgttatctggcgtcgctgcaaattactttgcaacgggcgcgggcattatatcagcacggcgcagtaagttatctggaagtgctggatgccgagcgttctttatttgcaacccgacaaactttactcgacctgaattatgcccgtcaggttaacgaaatttctttatataccgcacttggtggcggttggcagcaataacttttaactccaggagagaataaatgaaaaaagcactgcaagtcgcaatgttcagtctgtttaccgttattggctttaatgcccaggctaacgaacatcatcatgaaaccatgagcgaagcacaaccacaggttattagtgccactggcgaggtaaagggtattgatctggaaagcaaaaaaatcaccatccatcacgatccgattgctgctgtgaactggccggagatgaccatgcgctttaccatcaccccgcagacgaaaatgagtgaaattaaaaccggcgacaaagtggcgtttaattttgtccagcagggcaacctttctttattacaggatattaaagtcagccagtaacccaggtttaatgagatgaaaaaaatcgcgcttattatcggcagcatgatcgcgggcggtattatttctgcggcaggttttacctggtttgcaaaggctgaaccacccgcagaaaaaacgtcgaccgcagaacgtaaaatcttattctggtacgacccgatgtaccccaatacgcggttcgataaaccaggtaaatcgccgtttatggatatggatctggtgccgaaatatgccgatgaagagagttctgcgtctggtgtgcgcattgacccgactcagacgcagaatctgggggtgaaaacggctaccgtcacgcgcgggccgctgacttttgcccagagtttcccggcgaatgtcagttacaacgagtatcagtatgccattgtgcaggctcgcgctgccgggtttatcgacaaggtgtatccgcttaccgtgggcgataaagtacaaaagggcacaccgcttctcgacctgaccattcctgactgggtggaagcgcagagtgagtatttactgctgcgcgaaaccggcggtacggcgacccagactgaaggcattcttgagcggctgcgactggcgggaatgccggaggcggatattcgccgcctgatcgccacgcaaaaaatccagactcgctttacgctcaaagcgcccattgatggcgtgatcaccgcgtttgatctgcgcgcgggaatgaatatcgccaaagataacgtggtcgcgaaaattcagggtatggacccggtgtgggtcactgctgcgatcccggagtccatcgcctggctggtgaaagatgcctcgcagtttaccctcaccgttccggcgcgaccggataaaacactcaccatccgcaaatggacgctgctacctggcgtggatgccgcgacccgcacgctgcagctgcgtctggaagtcgacaacgccgacgaggcgctaaaaccgggaatgaacgcctggttgcaactcaataccgccagcgaaccgatgctgctcattccgtcacaggcgctgattgataccggcaacgaacagcgggtgattaccgttgatgccgacggacgctttgtaccgaaacgcgttgccgttttccaggcatcgcaaggcgtcaccgcgttacactctggtctggcggaaggtgaaaaggtggtttccagcggcctgttcctgattgattccgaagccaatatttctggcgcactggagcggatgcgctctgaaagtgctaccaatgcgcattgagggaataaccaatgattgaatggattattcgtcgctcggtggcgaaccgttttttggtgctgatgggcgcgttgtttctgagcatctggggcacctggaccatcattaacacgccagtggatgcgctgccggatctctccgatgtgcaggtgattattaaaaccagctatcccggtcaggcaccgcaaatcgttgaaaatcaggtgacttatccgctaaccaccaccatgttgtcggtgcctggcgcgaagactgtgcgcggtttctcacagtttggcgactcttatgtgtatgtcattttcgaagatggtaccgatccgtactgggcgcgttcgcgggtgctggagtacctcaaccaggtacagggtaagctgcctgcgggagtcagcgccgagctgggaccagatgccacgggtgttggctggatctatgaatatgcactggtggatcgcagcggtaagcacgatctggccgatttacgctcattgcaggactggtttctcaaatatgagctaaaaaccatccctgacgttgcggaagtggcgtcggtgggcggcgtggtgaaagagtatcaggtggttatcgattcccagcgcctggcgcaatatggcatcagtctagccgaagtaaaaagcgcgctggatgcttcaaaccaggaagcgggcggttcgtcgatcgaactggcggaagcggaatatatggtgcgcgccagcggctatctgcaaacgctcgacgactttaatcacatcgttttaaaagccagtgaaaatggcgtgcccgtttatctgcgtgatgttgcgaaggtccagattggcccggagatgcgccggggcattgccgaactgaatggcgaaggtgaagtggcgggcggggtggtgatcctgcgatccggcaaaaacgcccgagaagtgatcgccgccgtgaaggacaaactggaaacgctgaaaagtagtctgccggaaggcgtggagatagttacaacatacgatcgcagccagctcattgaccgcgccatcgacaacctcagcggcaagttgctggaagagtttattgtggtggcggtagtctgtgcgctgtttctctggcatgtgcgctcggcgctggtggcgattatttcgttgccgctggggttgtgtattgcttttattgtcatgcacttccagggactgaatgccaatattatgtcgttgggcggcattgcgattgccgtcggggcgatggtcgatgccgctatcgtcatgatcgaaaatgcacataaacggctggaagagtggcagcaccagcatcctgacgccacgctggataataaaacgcgctggcaggtgatcaccgatgcatctgttgaagtgggtccggcgctatttatcagtctgctgattatcacgttgtcgtttatcccgatcttcaccctggaagggcaggaagggcgtctgtttggcccgttggcgttcaccaaaacgtatgcgatggcgggtgcggcgctgctggcgatcgtagtgatcccgatcctgatgggctactggatccgtggcaaaattccgccggaaagcagtaacccgctcaatcgctttttgattcgtgtttatcatccgctgttgctgaaagtactgcactggccgaaaaccacgctgctggtggcggcgctttcggtgctgacggttctctggccgctcaataaagttggcggggaatttttaccgcagatcaatgaaggcgacttgttgtatatgccatcgacgctgccggggatttccgcagcagaggcggcgagtatgctgcaaaaaaccgacaagctaattatgagcgtacctgaagtggcgcgggtatttgggaaaaccgggaaagcggaaaccgccaccgattctgctccgctggagatggtagaaacgaccatccagcttaagccgcaggagcagtggcggccaggcatgacgatggacaaaatcattgaggaactggataacaccgtgcgtctgccggggctggcgaatctgtgggtgccgccaattcgtaaccgtatcgatatgctctcgactggcattaaaagccccatcggaattaaagtttccggcactgtgctggcggatatcgacgcgatggcggagcaaattgaagaggtggcacgaacggtaccaggcgtggcttctgcgcttgccgagcgtctggaaggtgggcgctatatcaacgttgagattaaccgtgaaaaagccgcgcgttacggtatgacggtggcggatgtgcagttgtttgtgacttctacggtgggcggggcgatggttggcgaaacggtggaaggaattgcccgttatccaattaatctgcgttatccgcaaagctggcgcgatagtccgcaggcactgcgccagctgccgattctgacgccgatgaagcagcaaatcaccctggcagacgtggccgacattaaagtctctaccggaccgtcaatgctgaaaaccgagaatgcgcgcccgacgagctggatttatatcgatgcccgcgatcgtgacatggtgtcggtggttcacgatttgcaaaaagcgatagctgaaaaagtgcagttaaaaccgggcaccagcgtggcattctccgggcagttcgagctactggagcgcgccaaccataagcttaaactcatggtgccgatgacgttgatgattatcttcgtgctgttgtatctggcgttccgtcgggtgggcgaagcgttgctgattatcagcagcgtaccgtttgcgctggtgggcggcatctggttgctgtggtggatgggctttcatctttccgtggcgacgggcactggctttatcgccctcgccggggtcgccgccgaatttggcgtggtgatgctgatgtatttacgtcacgccatagaggccgagccgtcgttgaataatccacaaacattcagcgagcagaagctggatgaggcgttatatcacggcgcggtcctgcgcgtgcgcccgaaagcgatgacggtggcggtgattatcgccggtctgctgccgattctgtggggaacgggggctggttcagaggtgatgagccggattgccgcaccgatgattggcggcatgatcaccgcacctttgctgtcgctgtttattatcccggcggcgtataagctgatgtggctgcaccgacatcgggtacggaaataaaagcaggataccccgtttaaccgtgtggattgtgtcttgcgacgatgggcactaaatgttaaaaggtgcccctcaacaaaaaagacacacaggggaaaggcgtgaaaaacgcgtcaaccgtatcggaagatactgcgtcgaatcaagagccgacgcttcatcgcggattacataaccgtcatattcaactgattgcgctgggtggcgcaattggtactggtctgtttcttggcattggcccggcgattcagatggcgggtccggctgtattgctgggctacggcgtcgccgggatcatcgctttcctgattatgcgccagcttggcgagatggtggtcgaagagccggtatccggttcatttgcccactttgcctataaatactggggaccgtttgcgggcttcctctctggctggaactactgggtaatgttcgtgctggtgggaatggcagagctgaccgctgcgggcatctatatgcagtactggttcccggatgttccaacgtggatttgggctgccgccttctttattatcatcaacgccgttaacctggtgaacgtacgcttatatggtgaaaccgagttctggtttgcgctgattaaagtgctggcgatcatcggtatgatcggctttggcctgtggctgctgttttctggtcacggcggcgagaaagccagtatcgacaacctctggcgctacggtggtttctttgccaccggctggaatgggctgattttgtcgctggcggtaattatgttctccttcggcggtctggagctgattgggattactgccgctgaagcgcgcgatccggaaaaaagcattccaaaagcggtaaatcaggtggtgtatcgcatcctgctgttttacatcggttcactggtggttttactggcgctctatccgtgggtggaagtgaaatccaacagtagcccgtttgtgatgattttccataatctcgacagcaacgtggtagcttctgcgctgaacttcgtcattctggtagcatcgctgtcagtgtataacagcggggtttactctaacagccgcatgctgtttggcctttctgtgcagggtaatgcgccgaagtttttgactcgcgtcagccgtcgcggtgtgccgattaactcgctgatgctttccggagcgatcacttcgctggtggtattaatcaactatctgctgccgcaaaaagcgtttggtctgctgatggcgctggtggtagcaacgctgctgttgaactggattatgatctgtctggcgcatctgcgttttcgtgcagcgatgcgacgtcaggggcgtgaaacacagtttaaggcgctgctctatccgttcggcaactatctttgcattgccttcctcggcatgattttgctgctgatgtgcacgatggatgatatgcgcttgtcagcgatcctgctgccggtgtggattgtattcctgtttgtggcatttaaaacgctgcgtcggaaataaggcattcacgctacatccgacaaaacgatgtccgctctcatccattcgatgagagcggtttttttaattactgcttaaatgcacccgccagagagcgaatatcattgccggttggcgactgatgaagtcgcagaccaaactcttcgacaatcgcaaatatgtgatcgaatatatcagcctgaatgctttcatattccagccacaccacggtgttagtaaacgcgtagatctcgagcggtaaaccgttatcacctggagccagttggcgtaccattaaggtcatatctttacgaatccgcggatggttacgcagatattcgttcagataggcacgaaaggttccaatattggtcattcggcgcaggtttaatatcgactccgtagaaccttgctggcgattccactcattaatttcctgatggcggctggttaaataaggttttaacaagtgcgctttattcagacgttgcatttcgtcttcatcaagaaaacgaatactggtgacatcaatactgatactgcgcttaatacgtcgcccgccagatgctgacatcccgctccagtttttaaaggagtcagaaaccagagaccaggtgggaatagtggtaatggtattgtcccagttacgcactttgacggtggttaacccaatatcgatcaccgcgccatccgcgccgtatttcggcatctccagccagtcgcccagtttcagcatatcgttcgcggaaagctgaatacctgccaccagaccaagaatcggatctttaaaaaccaacatcagcacggcagccattgcaccaagaccgctgatcagaatcgctggcgactgaccaatcagcagcgagatcatcaaaatgccgaccaggattgcgccgatcagtttaatcccctgaaatatccctttcagcggtaactgagatgccgccgggaatttctgcgccagattcaaaataacatccagcaacgagaagactgaaagcagcgcatacatcatgatccacaactgcgcgcaggtagtcagaatatctgccgcttcggtgcctttttgcagccagaataccgcctgaatattgacgataatcccctgcagggtaaaagctaaacggtggaagagtttattctgggtaatgatttgcaaccaaagccgtgaactggcgatggcacgtttttcgaaggtccgcagtaccacccaatgcaaaataatatgcaccacgacggcggtcagaaaaataataccgaaaatcatcaccatcgaggtggtgtgatcgatctcaatacccgctaaatcttcaacctgggatattaaatcctgcataacgtctcctttatacaacagcagcctatgatgacggctgaaacagggttatgcaaatcaggagaatctgaggggaaatagccgggcagatgcccggcaagagagaattacacttcggttaaggttatgttttgcggcagacgagatttcggcagcgtagcgttaaaatcttcaacgctgtgatgacctaccggaacaaccaccagactggtgtagcctttctctttcagaccaaattctgcatcgaggatggcggcgtcaaaaccttcgatgggtaccgcgtccagacccagcgccgccacgccgagcaggaagttaccgacgttgagataaacctgttttgccatccactctgcatcatcatgcagatctttacggtgcatatcagcgaagaacttgcgacctttatcgttcgcggctttcgcttccggcgtggcaaagcggccatcagcatcttcctggtcaacaaccagcttcagccaggcatcgtccatcgcggtttttgcacagaacaccacgacgtgcgaggcatcaagtattttacgttcgttgaacacataattaccggcagcggatttggcaacacgcgctttaccttcttccgtgctggcaacaataaaatgccacggctgggagttggtgctggatgggctgtattgcaggagagttttgatctgctcggcctgttccggggtaagttttttactggcatcaaatgccttagtggaatgacgctttaaggcgacagaaatgatatccataaagactccatgtgaaagtaattttgcgtgccagcagattacaaggttcaacgagaaatggtaagcgagaaaaatgcgctatagatttccgctttagcctggacgcactcttttttgatcgcgtttagccagaccatcaaccaccagattccacgaatcgttgatcagatcgcgaagtaacgcttcggagatttcctcgccgggatacaccgaaatccagtgctttttattcatgtgataccctggcttaatgctcgggtatatctgctgatttaacagggatttttgtggatcggacttcagattgataaaggggacgccgcgcagctccgacgacagcataaaaattttgccgccaattttaaaaacatcgaactccgggccaaaaggccagcaaagctcgacaaagggtaactcaagggccaggcgtttcgccgtttcgtgcagtgattgcttatccataaacgttcctttaggcgaaggagaataagcaaagtatgccgcgaagtacggcgataatcgacgtttaatccgccagcgagaaccagcgtcgccagataaagcgcagaacaaaatactcaatagcgcccagcactaaaaaccacagacaaaacaataaagtgtaaagctggctaagatccatcagatggaacatggtcaccagtttttgtgccagcgtcagccccagtgcgggggcgggcagcagcaggcaagagaggaaagccatcagcaaaatgcctgctgcggtagtcaaggtttctaaagggtgtttcataacattgttaaatgtaagttaaaacaccattgtcagggatattcttctgtaaggcaattccctacttagtcaccggcccagatctcacaatgctttttcaccagcccaatcagcgagccaccatcggcgacgaaatcgcgcatcagctgcgcttcattcagaccgctgacgacctggcgatgcagggcctcaatcgcgctcgatgcacccattttatgtgcggaaggggcgattttttccagcaatcgcaaggtatcttccgttagcggtcgacgatcgccagtgtgcggatcggtaatgacgccttccagcccatagcggcaggcctggaaacggttgaatttatacagcaggtaatctttctcctgatgtttaaacgggcgttccgtcagtaaccagtgggcggtggcctgaattaatcccgccatatttaccgcgtggctaagggttaacggggtatccatcacccgaacctccaccgtgccaaaatgaggactggggcgaatatcccagtgcagatctttaatgctgtcgatcatcgtggtgtaactcaggcagcgaaacagggcttcaaattgttgccagttactgacccacggcatcgggccattatcgggaaaggcggaaaaaatattcggtcgtgaggaggcaaaacgcgtatccgttccctgcatatacggcgacgcggcggaaagggcgatgaagtgcggcacaaaccgtgacaggccgtgcagcaaataaatggcgtcatcgccactggcgcagccaacatggacatgctgaccaaaaacggtcgcctgctggatgagatagccaaagttttccagcgttcgttgatagcgttcgttttcgcatacctcctgacgctgccatttctgaaacgggtgcgtgccaccgccgcaaatttccagatgatggtctgcggctgcctgcaatacgactttctgcatcgctgaaaactgcccggcagcctggttgatatcacggcaaacatccgtcgccagctccagcatactttcggtgatatcgtgctttacctctccggccgtgatctcatttttaaccgcgtcaatcagcattgaagagtcctggcttaagtcatagcccggcggattaaccacctgcatttccagttcaataccgagggtaaaaggttcagaaacataaaaatcgggtaatggcataggtttctcttaagttggcgttttctattcagtatagaagtcggagcggctgggcgagatgcggaagttctggaatgtttctttttttggtgatggtgactgaagcaatttggctacttttgcaatgtgacaagttatggcacggctggctggtggcgaagaattttgacgattgaggcatgcagaaaaaaacgggttcagcttcagttgatcaaatggggagtgagaagtccgaaacaggacttactgtataaataaacagctattttgctaagcaagggtaagataactgcgggtgcctgaagctttccggtttcaggtttactctgaggtctggaaagatgaagccccaggacgatatttctatcaaccctggggctacctacccaaacctgaacaatttggatggtagtcccttcttcgcatggaggcaatataaacatgctgacgaaatatgcccttgcggcagtcatagtgctgtgtttaacggtgctgggatttacgcttctggtcggggattcgctgtgtgagttcaccgtaaaggaacgtaatattgagtttaaggttgttctcgcttacgaaccgaagaagtagccgttgttatgggagcaatccccgcatatccggttgtcaggtcaggatggtaaggcacctgctttacactttcgcccgcggtcagtgatggctgcgggcgatttcgttttaagagcaatgatgagttttgccgacagaagtccgaaacaggattcactgtataaataaacagctattttgttgaggaagggtaagataacggcgggtgcctgaagctttccggtttcaggttaactctgaggtctggaaagatgaagccccaggagatatttctatcaatcctggggctgccactccgagcctcaacaactcggatggtagtcccttcttcgcatggaggcaatataaacatgctgacgaaatatgcccttgtggcagtcatagtgctgtgtttgacggtactgggatttacgcttctggtcggagactcgctgtgtgagttcaccgtaaaggaacgtaatattgagtttaaggctgttctcgcttacgaaccgaagaagttagccgttgtgmkgggagcaatccccgcatatccggttgtcaggtcagagtggtaaggcacctgctttacactttcgcccgcggtcagtgatggctgcgggcgaatcgtaccagatgttgtcaattaatcgtgttggcacagagttatgactattttttcttttatctgccagtgcacagcaaacatctcattctcacgatgaatgatgacctgctgtttattccagctaattatctgatagtccagaaaacctgcatcagtttggatctcacttgccttaaatgcgctctctttggcggaaaatgccagtgtcagcgccagagaaaaggctaaaccgcagtctgcgagtcgctcgtgttctgctggtgtaataatgttgtctgtcaattcggtcgctgtttgcgcagaaaaaatttcttcgatatcaacgccaatcggttgacgggaaaccacggccaatgccgtagccccgcagtggctaatactgccgtatacctccgcaggccacaccggttggcgtagctcgccgattgcgggcacacatttatagccatattcccgcagcgcataaattgcagcgatccgcccggctaaatgttcggctttgcgcttccgtccagcgtgttgcagttgcgcgtaatgcggcagccagagtaaatcctgctcacaaaaattcgccggatcgaactcaacaaaatgcagcgtatgtccggcaaaggggagggaggtatgcgtagttttcatgtcgaccatattagagactgatgacaaacgctaaactgcctgatgcgctacgcttatcaggcctacatggtcctgcaatatattgaattggcaagatttttgtaggccggataaggcgttcacgccgcatccggcatgaacgacgcgcactttgtcaacaatctgacgttagcatcagaagtgagtgtttacgctcatgtaccacgtacgtcccggctcgttataggtatacgccccggcacccgcgatatagttggcccctgccagatcgcccgtggtctgggcattacccgcacgccacaaacgtttgtcgaacaggttgtccacgccgccggtcagactgacattcttcgtcacatcccaggtcgcgctcagacccacaatgctgtaaggactgatttctttggtttccgggccaaccgctggctgacctttgtagttgtattttttcggctgctgcttaccgtaccaggtgaaggtcgtttgcatcgacaaatcttcccgcgcctgccagctcagcgttgagttcaacgtgtactccgggatgatcgacaaacggtcgcccgtggttttgttttcactcttcagcatataagtgatgttattggtccacatcaccgtttcgctaactggtacgtttaacgatccttccagaccttcaaccactgctttcggcacgttatcccactgatagagatcggtgccgactgcgttttgccctacagccacatagcccgcttcaatcttattgcgataatcgttacggaaccaggtgacgcccgccagccagccgtcgcgtttgaactccagaccaatctctttgttgatgctggtttctgctttcaggtcatcgttaccttgcagatagcagccgcccgcgctggcatagcagccctgacctttactgtagagaatgtagttcgggttagtctggtacaggctcggtgctttataagcacgggcaatgcccattttgagcgtgaagtcatcgcctaaaccttgcgatatgttcagcgccgggctccagttattgccgacaatactgtgatgatcgaaacgcagccccggcgttacgatggtgctgtcagtcagctccatgttgttttcggcaaacagcgagaaaatttctgcttttgaatacgggctacggtcggtggcactcacaccatcaatagcgccgccggtgttcgccccggtcagcgcctgggtattggaactcaagtccttcatccgttgctgattccactccgtacccagcgtcagcgtctggttaacgaggaaatcaatcggcaggttaacttcgctgtgcagcatcacgtcatcgagatcgatatcgacgaaatcctgtgtcgctttttcgttaaatttcccttcggtaccgcccgccagaccttccggaatacgcgagttacgggtgtgttcatactgcacccagttgctggtggtcacgccgttatcccagccaccgttccaggtcagcgcgtagttctggcgatacaggcggttggtttcatcgccatatttcgagcgagtgtaagcgtcagagttggtgttctgggtatcgcccgcatacaggttaccctggcggctgtaacccgcttccagttccagcgattgcaatggtgcgaagtcccagcgcaccacgccgttaatatctttattgatcaccccttcgcgcccggctggtaacgtcgtggcatacgttccggcacgcgcggactgatggccctggttgatatcccacgcgtcagcctgggttttgtcgaggttgccatacaagcggaagctgaattcgtcgcccagcggaccggtcaggctgaagttggtgcgtttagtggcaccttcctctttatgttctggtgcattgaaataagcgtcccaggagccgtgccactcaccgctgccttttttggtaatgatgttaaccacgccgcccgccgcgccgttgccataacgcgcagctgccggaccacgcagaacttcaatacgttcaatcatttcaggtggcacccaggaggtatcaccacgggtatcgcgctcgccacgccagccctgacgcaccgagttacggctgcttaccggcttgccgtcaatcaaaatcagcgtgttttccggacccataccgcgaatatcaatctgtcggttattcccacgctgaccactggtggagttaccggtcaggttaacgcctggcatggtacggatgatctccgacacatcgcgggcaacggggtttttgcggatttcatctgcggtgatagtcgaaacgccaggcgcctgtaagttctgctcggcggcggtaacgacaatggtatcgtcatgtgaaacaggagtatcggtcggctcttgtgcctgcgctaccccataaatccccagattgaccaacaaggccagggaatgaatcttcttgttcattgttttattcctgcatttttgccacgaattgcaactgtcgggcatggtcgtcctcaacacgacgcatcccgctaccgcgaaaacctttgatcctgaaagacacgcagtgcagttggttaataaatgtccgcgcttcccacggcgcgccattacgctattgcaaatgcaaatagttatcaataatattatcaatatatttctgcaatcaatgaaaaattgcacagtaaacatggggttatggtgtgacggcgttaaaagtaggaagtgagagctggtggcagtcgaaacatggcccggaatggcagcgtctgaatgacgaaatgtttgaggtcactttctggtggcgtgatccccaaggttctgaagaatactcgacgataaagcgcgtatggatctacatcactggtgtgaccgatcatcatcagaacagccagccccagtcgatgcagcgaattgcaggtactgatgtctggcagtggacgacacaactcaatgccaactggcgcggcagctactgctttattcccaccgaacgcgatgacattttttctgcaccatcccccgatcgcctcgaattacgtgaaggctggcgaaaactattaccccaggcaatagccgatccgctgaatccacaaagctggaaaggcgggcgagggcacgctgtttctgcactcgaaatgccgcaagcgcctctgcaaccgggatgggattgtccgcaagcgccagaaatagcagccaaagaaattatctggaaaagtgaacggttgaaaaattcacgtcgtgtatggatttttaccaccggcgatgcaacagcagaagaacgtccgctggcagttttgctcgatggcgaattttgggcgcaaagtatgcccgtctggcctgtgctgacttcgctgacccatcgtcagcaacttcctcccgccgtgtatgtgttgatcgacgctatcgacaccacgcaccgcgcccacgaactgccgtgtaatgcggatttctggctggcagtacagcaagagttattacccctggtgaaagctattgccccttttagcgatcgcgccgatcgcaccgtggtcgccgggcagagttttggtgggctgtccgcgctgtatgccggactgcactggcctgaacgctttggctgtgtattaagccagtcaggatcgtactggtggccgcatcggggcgggcagcaagagggcgtgttacttgaaaagcttaaagctggtgaagttagcgccgaaggtctgcgcattgtgctggaagcgggtattcgcgagccgatgattatgcgggccaatcaggcgctgtatgcgcaattacaccccataaaagaatccattttctggcgtcaggttgacggcggacatgatgcgctttgttggcgcggtggcttgatgcaggggctaatcgacctctggcaaccacttttccatgacaggagttgaatatggcattcagtaatcccttcgatgatccacagggagcgttttacattttgcgcaatgcgcaggggcaattcagtctgtggccgcaacaatgcgccttaccggcaggctgggacattgtgtgtcagccgcagtcacaggcgtcctgccagcagtggctggaagtccactggcgtactctgacaccggccaatttcacccagttgcaggaggcacaatgagccagcatttacctttggtcgccgcacagcccggcatctggatggcagaaaaactgtcggatttaccctccgcctggagcgtggcgcattacgttgagttaactggagatgttgatgcgccattactggcccgcgcggtggttgtcggactagcgcaagcagatacgttgcggatgcgttttacggaagataacggcgaagtctggcagtgggtcgatgatgcgctgatattcgaactgccagaaattatcgacctgcgaaccaatattgatccgcacggtactgcgcaggcattaatgctggcggatttgcaacaagatttgcgcgtcgatagcggtaaaccactggtctttcatcagctgatacatgttgcggataaccgctggtactggtatcagcgttatcaccatttgctggtcgatggcttcagtttcccggccattactcgccagatcgccaatatttactgcacatggctgcgtggcgaaccaacgcctgcttcgccgtttacgcctttcgctgatgtagtggaagagtaccagcaataccgcgaaagcgaagcctggcagcgtgatgcggcattctgggcagaacagcgtcgtcaactgccgccgcccgcgtcactttctccggcacctttagcggggcgcagcgcttcggcagatattctgcgcctgaaactggaatttaccgacggggaattccgccagctggctacgcaactttcaggtgtgcagcgtaccgatttagcccttgcgctggcagccttgtggctggggcgattgtgcaatcgcatggactatgccgccggatttatctttatgcgtcgactgggctcggcggcgctgacggctagcggacccgtgctcaacgttttaccgttgggtattcacattgcggcgcaagaaacgctgccggaactggcaacccgactggcggctcaactgaaaaaaatgcgtcgccatcaacgttacgatgccgaacaaattgtccgtgacagcgggcgagcggcaggtgatgaaccgctgtttggtccggtactcaatattaaggtatttgattaccaactggatattcctggtgttcaggcgcaaacccataccctggcaaccggtccggttaatgaccttgaactggccctgttcccggatgaacacggtgatttgagtattgagatcctcgccaataaacagcgttacgatgagccaacgttaatccagcatgctgaacgcctgaaaatgctgattgcccagttcgccgcggatccggcgctgttgtgcggcgatgtcgatattatgctgccaggtgagtatgcgcagctggcgcagatcaacgccactcaggttgagattccagaaaccacgctgagcgcgctggtggcagaacaagcggcaaaaacaccggatgctccggcgctggcagatgcgcgttacctgttcagctatcgggaaatgcgcgagcaggtggtggcgctggcgaatctgctgcgtgagcgcggcgttaaaccaggggacagcgtggcggtggcactaccgcgctcggtctttttgaccctggcactccatgcaatagttgaagctggcgcggcctggctaccgctggataccggctatccggacgatcgcctgaaaatgatgctggaagatgcgcgtccgtcgctgttaattaccaccgacgatcaactgccgcgctttagcgatgttcccaatttaacaagcctttgctataacgccccgcttaccccccagggcagtgcgccgctgcaactttcacaaccgcaccacacggcttatatcatctttacctctggctccaccggcaggccgaaaggggtaatggtcgggcagacggctatcgttaaccgcctgttatggatgcaaaatcactacccgcttacaggcgaagatgtcgttgcccaaaaaacgccgtgcagttttgatgtctcggtgtgggagtttttctggccgtttatcgcaggggcaaaactggtgatggctgaaccggaagcgcaccgtgacccgctcgctatgcagcaattctttgccgaatatggcgtaacgaccacgcactttgtgccgtcgatgctggcggcatttgttgcatcgctgacgccgcaaaccgctcgccagaattgcgcgacgttgaaacaggttttctgtagtggtgaggccttaccggctgatttatgccgcgaatggcaacagttaaccggcgcgccgttgcataacctgtatggcccgacggaagcggcggtagatgtcagctggtatccggcttttggcgaggaactggcacaggtgcgcggcagcagtgtgccgattggttatccggtatggaatacgggtctgcgtattcttgatgcgatgatgcatccggtgccgccgggtgtggcgggtgatctctatctcaccggcatccaactggcgcaggggtatcttggacgacccgatctgaccgccagccgttttattgccgatccttttgccccaggtgaacggatgtatcgtaccggagacgtcgcccgctggctggataacggcgcggtggagtacctcgggcgcagtgacgatcagctaaaaattcgcgggcagcgtatcgaactgggcgaaatcgatcgcgtgatgcaggcgctgccggatgtcaaacaagccgttacccacgcctgtgtgattaacctggcggcagccaccggtggtgatgcgcgtcagttggtgggctatctggtgtcgcaatcaggtctgccgttggataccagcgcattacaggcacagcttcgcgaaacattgccgccgcatatggtgccggtggttctgctgcaacttccacagttacctcttagcgccaacggcaagctggatcgcaaagccttaccgttgcctgaactgaagacacaagcgtcgggacgtgcaccgaaagcgggcagtgaaaagattatcgccgcggcattcgcgtcgttgctgggttgtgacgtgcaggatgccgatgctgatttctttgcgctgggcggtcattcgctactggcaatgaaactggcagcgcagttaagtcgacagtttgctcgtcaggtgacgccggggcaggtgatggtcgcgtcaaccgtcgccaaactggcaacgattattgatggtgaagaggacagctcccggcgcatgggattcgaaaccattctgccgttgcgtgaaggtaatggcccgacgctgttttgtttccatccggcgtccggttttgcctggcagtttagcgtgctctcgcgttatctcgatccacaatggtcgattattggcattcagtcgccgcgccctcatggacccatgcagacagcgacaaacctggatgaagtctgcgaagcgcatctggcaacgttacttgagcaacaaccgcacggcccttattacctgctggggtattcccttggcggtacgctggcgcagggcattgcggcgcggctgcgtgcccgtggcgaacaggtggcatttcttggtttgctggatacctggccgccagagacgcaaaactggcaggaaaaagaggctaatggtctggacccggaagtgctggcggagattaaccgcgaacgcgaggccttcctggcggcacagcagggaagtacttcaacggagttgtttaccaccattgaaggcaactacgctgatgctgtgcgcttgttaaccaccgcccatagcgttccgtttgatggaaaagcaacgttatttgttgctgagcgcacacttcaggaaggtatgagtcccgaacgtgcctggtcgccgtggattgcggagctggatatctatcgtcaggattgtgcgcatgtggatattatctctccaggggcgtttgtaaaaattgggccgattattcgcgcaacgctaaacaggtaaattaataatatctataaacccataattacagaaaataattatgggtttttttatttgtttgatttataggtttgatgaatatttctcttaaatagagtgaatgttgcattcagtggaaggaatttacaaacttcagcttcggataattatcaccaactggtaaagtgagcgccgtggagatttcccctattggactcattttcaggttataccccatgtcatcactgaatattaaacagggaagtgacgctcattttcctgagtatcctctggcgtcgcccagtaataatgaaattgatttacttaatctaatcgcagttttatggcgggccaaaaaaacggtcatggcggtcatttttgcgtttgcctgcgcaggcttgctgatctctttcatcctgccgcaaaaatggaccagcgcggcggttgtcacgcctccagaacctgttcagtggcaagagctggagaaaacattcactaagcttcgagtgctggatctggatatcaaaattgatcgtacagaagcatttaacctgtttatcaagaagtttcagtcggttagcttgctggaagagtacctgcgttcatcaccttatgtgatggaccaattaaaagaggcgaaaatcgatgaactggatttgcatcgcgctattgttgcattgagcgaaaaaatgaaagcggttgatgacaatgccagtaagaaaaaagatgaaccgtcactgtatacctcctggacgctaagttttaccgcgccaaccagtgaagaggcgcagaccgttttgagcgggtatatcgattatatctctgcgttggtggtgaaagagtcactcgaaaacgtccgtaataaactggaaatcaaaacccagtttgaaaaagaaaaactggctcaggatcgcattaaaacgaaaaatcaacttgatgcaaacattcagcgcctcaattattcactcgacattgccaacgcggcgggaattaaaaagcccgtatacagtaatggtcaggccgttaaagatgaccccgatttctctatttctctcggcgcagacggtattgaacgcaaactggaaattgaaaaagcggttactgacgttgcggaactgaacggtgaattacgtaatcggcagtatcttgtcgagcaattaacaaaagcaaatgtcaacgatgtgaattttacgccgtttaaatatcagttaagcccgtcattgccagtgaaaaaagacggtccgggtaaggcgattattgtgatcctttccgcgctgatcggcgggatggtggcttgtggtagcgtgttattgcgctatgcgatggcatccagaaaacaggatgccatgatggcagaccacttagtttaactatttgcggttgaaggtgccgttcgtccgagcggcaccacaagcggcgttccggctaccggatcgtcaatgatcatgcatcgcagaccataaatgcgctcaatcagttcagcagtgacaatctccttcggcgctccctgagcaacaattttcccttcccgcaatgcaatcaaatggctggcgtaacgacaggcctgattaagatcgtgcagcaccgccgccagggtatagcctttctcgcggttcagttcgcttaacagttccagtagatcaatctgatgactgatatccagccaggtcgtgggttcgtcgagcagcataattgccgtttcctgggccagcaccatcgcgatccacgctcgctggcgttgtccgccagaaagggtatccacgctttgatctgccagatgagttattcccgtggcctgcatcgctttcgttaccgcttcttcatcctctttgcgccagcgggtaaacagcggttgatgcggataacgtccacgcgccaccagctcctgcacggtgatatcgcccggcgtggtagcattttgcgccaacagaccaatccggcgtgcaacttctttactggcgtaatgttgaatgtgctcgccatccagccagacatgcccgtgagcaggcgtcatcaggcggcttaaggtacgcagtaacgtggatttaccacagccatttggtccgataattgccgtgaagtgaccatcaggaatttctacagtcagattttccgcaacggtatatttgccatatcccagggttaactgttcgccgcgcaaacgggctactgattcggtcattttttgcgagactcctgaattaacaagacgataaggtaaataccgccgaggctgacggtaacgacgccaaccggaagttgatacggcataaacagttgttgggcgcagagatcggccgccagcagtaacagcgctccgcacagcgccgcctgggtcagcccccagcgagcggtgccgctaatgcgtcgggcaatgtgcggcgcgactaaagcaataaaggaaatcggcccggcaagcgccgttgccgcagcggtaagcaccactgcaaccagcatcattaacagacgcgaacgctcgacgctgacgcccagcgcgcaggcggtatcatcgcccatctccagcaagcgcattcgccgcaccagcaaggcggcggcaatgagcatcaatataatgatgggtgcggaaggcgaagtttttgcccacgtcaggccattgagcgatccggcattccacaaacccgctgttagcgccgtttctaaagacgctttcagcaacagccaggtattaaaggccaccagcatggcgcgaacgccgatgccgataataatcaaccgaaaggtgtcgataccgttacgccaggcgagcagccagaccaacagagaagtgacaatgccgcccaccattgctgccagcgcgatagccgtcaggtcctgaccaaacagcaccatcgccaccagcacgccgctccacgccccggtgttaaagcccattacgtcagggctgccgagcgggttacgcatcagcgactgaaaaatcgcaccgctgacgcccagtgccgcgccaatcaacagcgccatcagcacgcgtggtaaacgccattcggtgaccaccatcgtcatactgcgcggcgcatcgcccatcagcgcggcgaatacctgcgaggtttccagcgtgacggcaccgctgcgtaatccccagatacctgcaaccacacaggcggaaataagcagcaaacaggtgatgagtaatcggcgagagacgtaaatcatgcaccacctcgcgttttacgtcgcacgaggaagatcagcaccggtgcaccaataaacgcactgaccacagaaacgcgcaactcgccgggcacaatcacccgcccgatgatatcggcaaacagcagcagggcaggggtagcaagtagcgtgacgggcagcgaccagcgatgatcggcacctaccagccagcgcgccatgtgcggcatcatcaggccgataaaggcaatcgggccaactaccgccgtcgcactaccacaaagcacggtaatcgccagcagaccaattaactgtgtgcgcgccacgcgactgcccagcgccgtcgcggtgtcactgccgaggctcaaactgttcagcgcgcggctcagtaatagcgcggttgctccggcgatcagcaccgggatcagcaccacttttaaggtatgtagattgcgaatatccagcgaaccggcttgccagaaacgcagttgatcgtagacatcaggattaagcagggcgatgccgctggtcagcccttccagcaccgccgccagcgccacgcccgccagggttaaacgcaccggacttaactgcccgccgccctgactgccggtaaaggcaacaatcaatgaggccaccagcgccccggcgaaggccatcgccagttgttcctgcgcggatgagtaaccaaacagcgccgcacccagcacaatggcaaagctggctccggcattcacgccaagcaagccggggtcggcaagtggatttcgggtgagggtttgcatcaacgccccggcaaggccaagcgcgccgcctgcaagtaaaccggcaagggtgcgcggcagtcgcgcgtcgagcacgatggtgcagtcggcgctctggcaggtgccggagagggcctccagcactacggaagcggggagtgattttgccccaatgagcaggcttaatgccgtcgcgataatcagtaataacagcaatccgggcacggcaatggcgcgtgtcacggcaacagaaccagacatacgaacttccatgataatgaaattaattatcgttatcgatcttatttggatatgttagcatgtgcagcctaagaataggtatttaaaatatttgatggcaaggcattgtaatgaataaacaatcctggctgcttaacctcagcctgttgaaaacgcacccggcgtttcgcgcagtattcctcgctcgttttatctcaattgtgtctctgggtttgctcggcgtcgcggtgccggtgcagatccagatgatgacgcattctacctggcaggtggggctttcggtgacgctgaccggcggcgcgatgtttgttggcctgatggttggcggtgtgctggcggatcgctatgagcgcaaaaaagtgattttgctggcgcgcggcacctgtggcattggcttcattggactgtgccttaatgcactgctgccggagccgtcattgctggcaatctatttacttggtttatgggatggttttttcgcatcgcttggcgttacggcgctattggcggcgacaccagcactggtagggcgtgaaaacttaatgcaggccggggcgatcaccatgttgaccgtgcgtctggggtcggtgatttcgcccatgattggcggtttattgctggcgaccggtggcgtagcctggaactacgggctggcggcggcgggcacgtttattaccttgctaccgttgttaagccttccggcgttgccaccgccaccgcagccgcgtgagcatccgttgaaatcattactggcaggatttcgttttctgcttgccagcccgctggtgggcgggattgcgctgctgggtggtttattgacgatggcgagcgcggtgcgggtactgtatccggcgctggctgacaactggcagatgtcagcggcacagattggttttctctacgcggcgatcccgctcggcgcggctattggtgcgttaaccagcgggaagctggcacatagtgcgcgaccagggttattgatgctgctctccacgctgggatcgttcctcgccattggtctgtttggcctgatgccgatgtggattttaggcgtggtttgtctggcgctgttcggctggctgagcgcggttagttcgttgctgcaatatacaatgctgcaaacgcaaaccccggaagcgatgttagggcggattaacggtttgtggacggcgcagaacgtgacgggcgatgccataggcgcggcgctgctgggtggtttgggcgcgatgatgacaccggttgcttccgcaagcgcaagcggttttggtttgttgattatcggcgtgttgttattgctggtgctggtggagttgcgacgttttcgccagacgccgccgcaggtgacagcgtctgacagttaatgcttaaaacagcgccttaagtcgttccagcacttgcgtggcgctgtagtaatccagacggaacgtctcggttcccagcgcataaacctgcttgttttgtactgcgggaaggtgcgcgagcagtggattggcataaatcgcatcggcatctttctgatcaccggcgaacaggaatagtgactcgccatttaacccagcagccagattttccccaccaagctgaatgatgtcatggcgtttgccctggctttggctggcgtttaaccctgcgggcaacttcgccagcgtaaagccgagttgttccagcatctgcccttgtgctgattccggcgtccagagattggcactgtgtgcagcggcggtatagacaatggcagtgaccggctgcggcggtaatttgatttgctctttcgccgctgccagttgcttatcaaactgtgcaatccgctctgccgcttgtttctcatgcccggtaatttcgccaagctgcgttaacagcgactgccagcttttgtcgtcgtaattgatgattaatgtcggggcgatggtggaaagctgatcatacagtgccagcgccgaatccccgccggttgcgctaattaaaatcagatccggcatttgcgcggcaacggcttcggcgctcggttcgccgatatagagccgttgcagtttgcgttctttcgccaccttgctccactggcgtaaaaagccctggtcatccgcgacgcggttattcggcgtggtcgcgccgctggcgatcaccggagcatcaatcgccagcagtgagccggtcagggtgacgctggtggaaacaatacgctgcggctggctttccagtgtatgtgtgccacggctgtcagtaatctgacgcggccagtcagcggcctgaactgcggctattcctgaaagcaaaagtcctgttaatagaagggcgttgcggtagagcggggcgagtctcacaaatcagcttcctgttattaataaggttaagggcgtaatgacaaattcgacaaagcgcacaatccgtcccctcgcccctttggggagagggttagggtgaggggaacagccagcactggtgcgaacattaaccctcaccccagccctcaccctggaagggagagggggcagaacggcgcaggacatcacattgcgcttatgcgaatccatcaataatgcttctcattttcattgtaaccacaaccagatgcaaccccgagttgcagattgcgttacctcaagagttgacatagtgcgcgtttgcttttaggttagcgaccgaaaatataaatgataatcattattaaagcctttatcattttgtggaggatgatatggatacgtcactggctgaggaagtacagcagaccatggcaacacttgcgcccaatcgctttttctttatgtcgccgtaccgcagttttacgacgtcaggatgtttcgcccgcttcgatgaaccggctgtgaacggggattcgcccgacagtcccttccagcaaaaactcgccgcgctgtttgccgatgccaaagcgcagggcatcaaaaatccggtgatggtcggggcgattcccttcgatccacgtcagccttcgtcgctgtatattcccgaatcctggcagtcgttctcccgccaggaaaaacagacctcagcccgccgttttacccgcagccagtcgctgaacgtggtggaacgccaggcaattcctgaacaaaccacgtttgaacagatggttgctcgcgccgccgcacttaccgccacgccgcaggtcgacaaagtggtgttgtcacgattgattgatatcaccactgacgccgccattgatagtggcgtattgctggaacggttgattgcgcaaaacccggttagttacaacttccatgtcccgctggctgatggtggcgtcctgctgggggccagcccggaactgctgctacgtaaagacggcgagcgttttagctccattccgttagccggttccgcgcgtcgtcagccggatgaagtgctcgatcgcgaagcgggtaatcgtctgctggcgtcagaaaaagatcgccatgaacatgaactggtgactcaggcgatgaaagaggtactgcgcgaacgcagtagtgagttacacgttccctcctctccacaattgattaccacgccgacgctgtggcatctcgcaactccctttgaaggtaaagcgaattcgcaagaaaacgcactgactctggcctgtctgctgcatccaacccccgcgctgagcggtttcccgcatcaggccgcgacccaggttattgctgaactggagccattcgaccgcgaactgtttggcggcattgtgggttggtgtgacagcgaaggtaacggcgaatgggtggtgaccatccgctgcgcgaagctgcgggaaaatcaggtgcgtctgtttgccggagcggggattgtgcctgcgtcgtcaccgttgggtgagtggcgcgaaacaggcgtcaaactttctaccatgttgaacgtttttggattgcattaaggagcgaggatgagcattccattcacccgctggccggaagagtttgcccgtcgctatcgggaaaaaggctactggcaggatttgccgctgaccgacattctgactcgccacgctgcgagtgacagcatcgcggttatcgacggcgagcgacagttgagttaccgggagctgaatcaggcggcggataacctcgcgtgtagtttacgccgtcagggcattaaacctggtgaaaccgcgctggtacaactgggtaacgtcgctgaattgtatattacctttttcgcgctgctgaaactgggcgttgcgccggtgctggcgctgttcagccatcagcgtagtgaactgaacgcctatgccagccagattgaacccgcattgctgattgccgatcgccaacatgcgctgtttagcggggatgatttcctcaatactttcgtcacagaacattcctccattcgcgtggtgcaactgcacaacgacagcggtgagcataacttgcaggatgcgattaaccatccggctgaggattttactgccacgccatcacctgctgatgaagtggcctatttccagctttccggcggcaccaccggcacaccgaaactgatcccgcgcactcataacgactactactacagcgtgcgtcgtagcgtcgagatttgtcagttcacacaacagacacgctacctgtgcgcgatcccggcggctcataactacgccatgagttcgccgggatcgctgggcgtctttcttgccggaggaacggttgttctggcggccgatcccagcgccacgctctgtttcccattgattgaaaaacatcaggttaacgttaccgcgctggtgccacccgcagtcagcctgtggttgcaggcgctgaccgaaggcgaaagccgggcgcagcttgcctcgctgaaactgttacaggtcggcggcgcacgtctttctgccacccttgcggcgcgtattcccgctgagattggctgtcagttgcagcaggtgtttggcatggcggaagggctggtgaactacacccgtcttgatgatagcgcggagaaaattatccatacccagggttacccaatgtgtccggacgatgaagtgtgggttgccgatgccgaaggaaatccactgccgcaaggggaagtcggacgcctgatgacgcgcgggccgtacaccttccgcggttattacaaaagtccgcagcacaatgccagcgcctttgatgccaacggtttttactgttccggcgatctgatctctattgatccagagggttacatcaccgtgcaggggcgcgagaaagatcagatcaaccgtggcggcgagaagatcgctgccgaagagatcgaaaacctgctgctgcgccatccggcagtgatctatgccgcactggtgagcatggaagatgagctgatgggcgaaaaaagctgcgcttatctggtggtaaaagagccgctgcgcgcggtgcaggtgcgtcgtttcctgcgtgaacagggtattgccgaatttaaattaccggatcgcgtggagtgtgtggattcacttccgctgacggcggtcgggaaagtcgataaaaaacaattacgtcagtggctggcgtcacgcgcatcagcctgaaggagagaacactatggctattccaaaattacaggcttacgcactgccggagtctcacgatattccgcagaataaagttgactgggcctttgaaccgcaacgtgccgcgttgttaatccatgatatgcaggactattttgtcagcttctggggcgagaactgcccgatgatggagcaggtgatcgcgaatattgctgcgctgcgcgactactgcaaacagcacaatatcccggtttattacaccgcccagccgaaagagcagagcgatgaagatcgggcgctgttgaatgatatgtgggggccgggcctgacccgttcgccggaacagcaaaaggtggtggatcgcctgacgccagatgccgacgacacggtgctggtgaagtggcgctacagcgcgtttcatcgttctccgctggagcaaatgctcaaagagagtggacgtaaccagctgattattaccggggtatatgcccacattggctgtatgaccaccgcaaccgacgcatttatgcgcgatattaaaccgtttatggtggcggatgcgctggccgatttcagccgtgacgagcatttgatgtcgctgaaatatgtggccgggcggtctggccgggtggtgatgactgaagaattactgccagcacctgtccccgccagcaaagcggcgctgcgtgaggttatcctgccgttgctggacgagtccgatgaaccgttcgatgacgacaacctgatcgactacggtctggattcggtgcgcatgatggcgctggcggcgcgctggcgcaaagtgcatggtgatatcgactttgtcatgctggcgaaaaacccgaccatcgacgcctggtggaagctactctcccgcgaggtgaaataatggatttcagcggtaaaaatgtctgggtaaccggcgcaggtaaaggtatcggctacgccacggcgctggcgtttgttgaggcgggagcgaaagttacaggttttgatcaagcgttcactcaggagcaatatccctttgcgaccgaagtaatggatgttgccgacgccgggcaggtggcgcaggtatgtcagcgactgttagctgaaacggagcgactggacgtgctgatcaatgcggcgggaattttgcgcatgggcgcgaccgatcagctcagtaaagaggactggcagcagacttttgcggttaacgtcggcggtgcgtttaacctgttccagcaaaccatgaaccagtttcgccgtcagcggggcggggcgattgtcactgtggcgtccgacgccgcacacacgccgcgtattggtatgagtgcttatggcgcatcgaaagcggcgctgaaaagcctggcgttgagcgtcgggctggaactggcgggtagcggcgtgcgctgtaatgtggtttcgcctggctccaccgacaccgatatgcaacgcacgctgtgggtgagcgatgacgccgaagaacagcgtattcgcggctttggcgagcagtttaaactcggcattccgctggggaaaatcgcccgtccacaagagatcgccaacacgattttgttcctcgcctctgacctcgccagccatatcaccctacaggatattgtggtcgatggcggctcaacgctgggggcataagcatgatctggaaacgccatttaacgctcgacgaactgaacgccaccagcgataacacaatggtggcgcatctgggaattgtgtatacccgtctgggagatgatgtgctggaagccgaaatgccggttgatacccgtactcatcagccgtttggcctgctgcatggcggcgcgtcggcggcgctggctgaaacgctgggatcgatggccggatttatgatgacccgtgacgggcagtgtgtggtgggtacggaacttaacgccacccatcatcgcccggtgtctgaaggcaaggtacgcggcgtctgccagccgctgcatcttgggcggcaaaatcagagctgggaaatcgtcgttttcgatgaacaggggcggcgttgctgcacttgtcggctgggtacggcagttttgggatgagcccgacagaattaaatgagattgcaggaaaactcggttaacggagtgatcgagttaacattgttaagttaaatattggtttcaactccgatttacatggttaccgtgttgttaaatcgtacaaagatgttatagaaacaaaatgtaacatctctatggacacgcacacggataacaactatgaacaaatcagggaaatacctcgtctggacagtgctctctgtaatgggagcatttgctctgggatacattgctttaaatcgtggggaacagatcaacgcgctgtggattgtggtggcgtcggtctgtatctatctgatcgcttaccgtttttatgggctgtatatcgccaaaaatgtgctggcggttgacccgacgcgtatgacgccagcggtgcgccataacgacgggctggactatgtgccgacggacaagaaagtgctgttcggtcaccattttgcggccattgccggagcaggtccgttggttgggccggtactggcggcgcaaatgggttacctgccagggatgatctggctgctcgccggggtggttctcgctggtgcggtgcaggatttcatggtgctgtttgtttctacgcgccgtgacggtcgatcgctgggtgagctggtcaaagaagagatggggccaactgccggggtgattgcgctggtagcctgctttatgatcatggtcattatccttgcagtactggcgatgatcgtggtgaaagccctgactcatagcccgtggggaacgtataccgttgcgttcaccattccgctggcgatttttatgggaatctacctgcgctatctgcgtccgggccgcattggcgaagtgtcagtgattggcctggtgttcctgattttcgccattatctctggcggctgggtggcagaaagtccgacctgggcaccgtactttgactttaccggcgtgcagctgacctggatgctggtgggctacggttttgtggcggcggtgctgccggtgtggttgctgctggccccgcgtgactatctctcgaccttcctgaaaatcgggactatcgtcggtctggcggtaggcattttgattatgcgcccgacgctgaccatgcctgcgctgaccaaatttgtcgatggcactggcccggtatggaccggtaacctgttcccgttcctgtttatcaccatcgcctgtggtgcggtgtctggcttccatgcgctgatctcttccggcaccacgccgaagatgctggcgaacgaagggcaggcgtgctttatcggctacggtgggatgttgatggaatccttcgtggcgattatggcgctggtttctgcctgtatcatcgatccgggcgtgtattttgccatgaacagcccaatggcggtgctggctccggcagggacggcggatgtagtcgcttctgccgcgcaggtggtgagtagctggggctttagcattacaccagatacgctcaaccagattgccagcgaagtgggtgaacagtcgatcatttcccgtgcgggcggtgcgccgacgctggcggtggggatggcttacatcctgcacggtgcgctgggtggtatgatggatgtggcgttctggtatcacttcgccattctgtttgaagctctgtttattctgacggcggtagatgcgggtacgcgtgctgcgcgctttatgttgcaggatctgctgggcgtggtttctccgggcctgaagcggaccgattcactgcctgctaacctgctggcaacagcgctgtgcgtactggcgtggggctacttcctccatcagggcgtggtcgatccgctgggcggcattaacactctgtggccgctgtttggtattgccaaccagatgctggcagggatggcgctgatgctctgtgccgtggtgttgttcaagatgaaacgtcaacgttacgcctgggtggcgctggtaccaacggcctggctgctgatttgtaccctgaccgcaggctggcagaaagcgtttagcccggatgcgaaagtcggcttcctggccattgctaataagttccaggcaatgatcgacagcggcaatattccgtcgcagtatactgagtcacagctggcgcaactggtgttcaacaaccgtctggatgccgggttaaccatcttctttatggtggtcgtggtggttctggcgctgttctcgattaagacggcactggcggcattgaaagatccgaagccaacggcgaaagaaacgccgtatgagccaatgccggaaaatgtcgaggagatcgtggcgcaggcaaaaggcgcacactaaagtcagagtgaggggggatgttggcgaatgttggcatagtgccgagggttcctcctcaccctaaccctctccccgatggggcgaggggactgaccgagcgcgttgatagcatttgtaggccggataaggcgttcacgccgcatccggcactctttcagcaacatggttagcggaggccaagatgtttgattcactggcaaaagccggaaaatatttaggtcaggcggcgaagctgatgattggtatgcctgattacgacaactatgtcgaacatatgcgggttaaccatcccgatcaaacgccgatgacctacgaagagtttttccgtgagcggcaggacgcgcgctacggtggaaaaggcggcgcgcgctgctgctaaatttgcacgtcaggctttaaacgattccactttttcgaacgctgcacgcaacgtatctggtgtcagcgtgactggcaggtaatgaatggattccaccggacgcagggtgtgggtaatcactttgtcgatctccgcatgattattgatatccacttccagctccgccagcgtggtcggcagatgaaaacgctgatacgccccggttaattgcgccagcacatcatcctgactcagcaaggcgctttgtaccagaatgccataagcgactttggtgccgtggagaaatttctcggtttgcggcaggacagtcagaccgttatgcacggcatgagccgccgccacacgcgtaaaacgatcgcccagaccaccgaccatcccaccaccagcaataatagcatccaccacatcgcaaaatgattgcgttaactgttgattttgctgatcgctcagcgcctgttcgctactgtttaacaatacgtcgcgaatggcctgcgcattattgatccccagtcgcacggttagcggcaacgtttctggttgcggagccagcaccaccgcttcataccatttcgccagcgtgtcaccgatccccgccagcagatattgttgcggtgcattgaggataatctccggttccaccagcaccataaaattggcgtcgtcgaaaatctcataatgcagcgcctgtccggcatcgttataccagacggagagcggtgtccaggctgcgcaggtggcggcgatcgtcggagcggcaacaaatggcagaccgagacggcgggcgagggctttcgcggtgtcgagcagtgcgccgccgccgacgccaatcaccacgctgcgatcgtcaccggactcagccgccagttgctgtacatcgctttcgctgcaatgaccacgaaacaaaatatgctttgcccctggaagtccaaacgctggcggaagtttggtttgcgccgcagcaatggcgcgtttgccgtagatccacaccgcgcgagaaagttgttcatcagtgaaaaaatcgtgcaggtgattgaaacttcctggatgtgaaaagtagttagccgggccgacgaccacgcggataggattgtgaggcatgttgtgttgtccttattgttttatttagacatctaaacgtcttgattgccaaatactagcatcgtgttatagtgccttcaacacgcaacttcgtcaggtacaataaaaatgacaaataaccctctgattccacaaagcaaacttccacaacttggcaccactattttcacccagatgagcgcgctggcgcagcaacaccaggcgattaacctgtcgcaaggctttcctgattttgatggtccgcgctatttacaggagcggctggcgtaccacgttgcccagggggcaaaccaatacgcgcccatgaccggcgtgcaggccttgcgcgaggcgattgctcagaaaacggaacgtttgtatggctatcaaccagatgccgatagcgatatcaccgtaacggcaggggcgacggaagcgttatacgcggcgattaccgcactggtgcgcaatggcgatgaagtgatttgttttgatcccagctatgacagttactccccgccatcgcgctttctgggggaatagtgaagcgtatggcactgcaaccaccgcattttcgcgttgactggcaggaatttgccgcattgttaagcgagcgcaccagactggtgatcctcaacactccgcataaccccagtgcaactgtctggcagcaggctgatttcgccgctttgtggcaggcgatcgccgggcacgagatttttgtcattagcgatgaagtctacgagcacatcaacttttcacaacagggccatgccagtgtgctggcgcatccgcagctgcgtgagcgggcagtggcggtttcttcatttggcaagacctatcatatgaccggctggaaagtgggttattgtgttgcgccagcgcccatcagcgccgaaattcgcaaggtacatcagtatctgaccttttcggtgaataccccggcacagctggcgcttgctgatatgctacgtgcagaacctgagcattatcttgcgttaccggacttttatcgccagaagcgcgatattctggtgaatgctttaaatgaaagccggctggagattttaccgtgtgaaggtacatactttttgctggtggattacagcgccgtatctaccctggatgatgttgagttttgccagtggctgacgcaggagcacggcgtagcggcgattccgctatcggtgttttgcgccgatcccttccctcataaactgattcgtctctgttttgccaagaaggaatcgacgttgctggcagcagctgaacgactgcgccagctgtagttatttgacagtccaggcgcgggaatattgacggtcggcaaacagctcttgcagaccgttaatttgcttcaggcgcagcacttcgtcgctgtccattcccagctctttgccaattttattatcgtcccatcccaactggctaagttcacggacgatttccgacatggcggtgatttgatggcgtccacgagcgcgattatgacgaatagtcgcggcgatgcgttgattacgcgtaccttccagacaggtcaccggcaaataaccttttaagcgtaattttaatgatgatgagcctttaccaatttcatggcggtgaaaaccatccacgatttccagggcatttttatccgtatgcgtgaccacaatgggttgggtaaaaccatctatttcaatggattttttcagcagttttttttcgggtggtgccacgttgtttgggttgtaatcattaggcataagttggctgtttttaacccacagaacgcaatccactggctcttcacgaaaggggctaacctgatggatcgccatgcggatttcattaatcgcgttgatgcgatcatcttccggcaagctggcgagaaattgcgttaaatcctgcgttaatcgttgttgcatagtatcccccattcctgacgttttccttttatccgttcgttataacgctgatagtccttcgctttcgtaggactaaatgataatgcccgacaccagtaatcgttattgagtaaaactttgcatatccgccgccaggaggggatatctttcgcgccaatgtccccttgctgggtttgtggaacctcgatgcctttttctgataccagtgcaaataaatggcgattttattgcggtaatgctcagctgttttttccggcatgctattgagcagcaataatgcatattcttgccagtctaaatgttctggcttgaggattttccgatgcccatagaaatgattgtcatgtccggcgtaaatgccgccactttttaccccgctgactcgtgcgcacatagcagcccagcgatccggttcgataacgtgatagagccataatccttgtcgttgctccgggccaaaaggttcgcaaattcgcatatgacgcagaggaacgcctgcctgatacattaggttatacagtgggttgcagagactttgatgatttgcataccaggtccagatatcagccactttccagtcgtaaatggggtaaatgtaccagctatgaccgcctggtgcggccgtagtccagggtttatcgtcggcaaaacgttgtttatttaaactggcgatggcgacaaaacggttgtaggactcatccgcacggatgccgatcatcatcgccgccggacgtttttgtgaaaaccattcggcaaactcacgtacaaattgttcgaaggtcatgcctggctggtaaaagcagaaaaagtcaggatcggttatcgcatcttgcgggggctgacgcacccattcgacatcaggttcccagcactgccattcgggttggtattgtgaaagggaattttgcgtcgtaagcgggagcgcaacccagtaaaactcttcgatgacatcggtgtacaactcgcgcagggactgaacatagttaatggtgcaagagaattgcgcctcccagtcgataaacaaaacgcagatttttttgcccatttgtcgggcaagttcggctgtcagatgcagcattaaaccagagtctttgccgccagaaaatgagacacaaacgcggggtagggtgttgagtgtccaggtaatacgctctcgtgcagcttccagaatattgagcggaagaggaattttataaatagacatctgaagacgctctctgaacgttacagggtgaacagtgagataagactgttaattataaagtaaacactgtaaagcagagtgttttatttttcattcgcgctgtgaataaatagatgaaagttatagtagctgtctgtagttatatatcaaaaactctcatttagacggtcaataaatcgggagaacaccaaattatttaaagaagatttattataggaaatgtaaagctttattgaaggtaacggatgttctagttttatctcttttaaattaagaaagtcacggtaggaattataaagttcataggggactattcccagtaaatctgtaactgcaatgctattaatgattgtcagcaaagaggaaccacgaaatgagattttgcgattcataaatctctcgtctatttccatttgaatatcatcaactcctgctgatttggatattaattgggtgaactcttctgccataatttgttcataagtgctattgtcagtaattcgcggatgcttattactacaaattagagtattgcgaattgtatgcaatggcatgcaaatgacggaacggctgatcactggcatttgggtgatcaccagatcggctttgcggtgaaccaacagttcttcagcattctctgctgacatgaggatatcatggcactcaatctcgacagaggcatcttgccgtaggcagcggatcagcatactattattagagcaagaaatgagctgagggccgtagataataaagtttttctttagttcggacttattgactatattaattgtttgttcaaggcctttgaggtttttctcaagatggtgatgcagattcaaccctgttgtcgtcggcgcgataccttttcctgagcgaatgaataaagggtcattaaattgcgcacgtaagcgttgtaacgactggctcacggctgatggggtgatatatagtgattcagcagctttgctaatgcttaaatgctggtaaatacactcaaatatgacaagaaggtttaagtcgaactttttcaagtcgtagagattggccatacactactccggttatatttttcttccatggtatattcacttaatcaatgttttttgcgtatatatttttattgattatatttttttgcttaactcaggattaagtttttctaaaatagcatagccacttagggcagagcgagcaattcatgcttttttaggatggttgaaaagcagagatgtatttcaaccatccatgaattatcttttatttattccccataatgatattaagcgttttctgatcgggcaaccccacggcctgttgtagcgtattttccttactcatgtaatagatagccggcgtgacatttgcccccagatcgtccatcagtttctcattgtcacttaacactttcatttgctctgtacttacgtttgcaggcacgtttagcttaagcttgccaccagaggcttcatattgttgccaggtttttgcgggatctttggaggcaagaattgccgctgctgtcgccgggctttctggcttgataaccccaaccaacaatgttcttaattgcactttgccagaatctacccacgggcgcgcctgctgccagaactgtttacaatatgggcagaacggatcggcgaagacgtagacaatgaccggcgcatcttttttaccgtcgaggagccagtgggattgttccatccgttgccacatttcgcgtccggctggtgcgtaaatttctttttcgataagtgtgttactcaggttttcacctttctcgttgtacatgtaaccagagatagcgtgcttaccatctggagtcaggtagatggtgacgcccatatcctgatactttccgagataacctttcattcctccgggggcatcgaatgttttgatgattgtaatgccctgtttttcaatcgcttttactggagcaggaagttcctctgcgaaggcgattgcaggaagcagagccagtaaaagtatcttttttaacattaatttgtccttttcagtcagtgcaaaagtcgagtaaaaggcataacctatcactgtcataggtaagagcttagatcaggtgattgccctttgtttatgagggtgttgtaatccatgtcgttgttgcatttgtaagggcaacacctcagcctgcaggcaggcactgaagataccaaagggtagttcagattacacggtcacctggaaagggggccattttactttttatcgccgctggcggtgcaaagttcacaaagttgtcttacgaaggttgtaaggtaaaacttatcgatttgataatggaaacgcattagccgaatcggcaaaaattggttaccttacatctcatcgaaaacacggaggaagtatagatgtccttgattaacaccaaaattaaaccttttaaaaaccaggcattcaaaaacggcgaattcatcgaaatcaccgaaaaagataccgaaggccgctggagcgtcttcttcttctacccggctgactttactttcgtatgcccgaccgaactgggtgacgttgctgaccactacgaagaactgcagaaactgggcgtagacgtatacgcagtatctaccgatactcacttcacccacaaagcatggcacagcagctctgaaaccatcgctaaaatcaaatatgcgatgatcggcgacccgactggcgccctgacccgtaacttcgacaacatgcgtgaagatgaaggtctggctgaccgtgcgaccttcgttgttgacccgcagggtatcatccaggcaatcgaagttaccgctgaaggcattggccgtgacgcgtctgacctgctgcgtaaaatcaaagcagcacagtacgtagcttctcacccaggtgaagtttgcccggctaaatggaaagaaggtgaagcaactctggctccgtctctggacctggttggtaaaatctaagttccgcaatcgcgtaattaatcgggtgctgcggcacccgattttcttccccgcaccatgatgcaagctgcatccaggtagccgcagaggccgcttgcatgatgatgtttaaagcccaggagataaacatgctcgacacaaatatgaaaactcaactcaaggcttaccttgagaaattgaccaagcctgttgagttaattgccacgctggatgacagcgctaaatcggcagaaatcaaggaactgttggctgaaatcgcagaactgtcagacaaagtcacctttaaagaagataacagcttgccggtgcgtaagccgtctttcctgatcaccaacccaggttccaaccaggggccacgttttgcaggctccccgctgggccacgagttcacctcgctggtactggcgttgctatggaccggtggtcatccgtcgaaagaagcgcagtctctactggagcagattcgccatattgacggtgattttgaattcgaaacctattactcgctctcttgccataactgcccggacgtggtgcaggcgctgaacctgatgagcgtactgaacccgcgcatcaagcacactgcaattgacggcggcaccttccagaacgaaatcaccgatcgcaacgtgatgggcgttccggcagtgttcgtaaacgggaaagagtttggtcagggccgcatgacgttgactgaaatcgttgccaaaattgatacgggcgcggaaaaacgtgcggcagaagagctgaacaagcgtgatgcttatgacgtattaatcgttggttccggcccggcgggtgcagctgcagcaatttactccgcacgtaaaggcatccgtaccggtctgatgggcgaacgttttggtggtcagatcctcgataccgttgatatcgaaaactacatttctgtaccgaagactgaagggcagaagctggcaggcgcactgaaagttcacgttgatgaatacgacgttgatgtgatcgacagccagagcgccagcaaactgatcccagcagcagttgaaggtggtctgcatcagattgaaacagcttctggcgcggtactgaaagcacgcagcattatcgtggcgaccggtgcaaaatggcgcaacatgaacgttcctggcgaagatcagtatcgcaccaaaggcgtgacctactgcccgcactgcgacggcccgctgtttaaaggcaaacgcgtagcggttatcggcggcggtaactccggcgtggaagcggcaattgacctggcgggtatcgttgagcacgtaactctgctcgaatttgcgccagaaatgaaagccgaccaggttctgcaggacaaactgcgcagcctgaaaaacgtcgacattattctgaatgcgcaaaccacggaagtgaaaggcgacggcagcaaagtcgttggtctggaatatcgagatcgtgtcagcggcgatattcacaacatcgaactggccggtattttcgtccagattggtctgctgccgaacaccaactggctggaaggcgcagtcgaacgtaaccgcatgggtgagattatcattgatgcgaaatgcgaaaccaacgtcaaaggcgtattcgcagcgggtgactgtacgacggttccgtacaagcagatcatcatcgccactggcgaaggtgccaaagcctctctgagtgcttttgactacctgattcgcaccaaaactgcataagaagaagtaagattcacctgcaattgcttagccgccggggtcaaacctggcggcttttttatggcattaaaaagccctgccgggatggctccgggcagggcgggatatttattctggcaattaacgcacaaccagcaccggcagattggcatggcggatcacgctcgaggcgttagaacctaacagatgggtcgaaatcgatgggttgcgagaaccaataactacaacatcagcccccagttcttctgccaactcattgacttcatcccgcacgctaccaaaacggacatgttgtttaatgcgggaaggatcgatggtgaagtggctgaccatcgtttgcagacgttcttctgcttcatgttgcagatgctcttcaaaacgacgcacatcagcggcaaaacggtgcaggctcaggctggctgacccgggtagtacgtgaagtagatgaataactccgtcatcctgggcgaggaattcagcgtggcgaacagctttgtcgctcaattccatttcaaatacatcaactggcataatgattgtcttatacataaccctttctccctgttaatcatgaacaaatcattcgccatgattataatatttatccctgatatttgtctggttctttttccttacgaacggtttctgtgattaatatattctcactgaacaccaggaattctcccaaaacctgcggtaccgcccgttttcccgctgtgatagctacccttaaagactgactcttttttgaactgtctctggaggttgcatgaaagcattgacttatcacggcccacatcacgttcaggtagaaaatgttcccgatccgggcattgaacaggcagatgatattattctgcgtattacggcaacggcgatctgtggctctgacctccatctttatcgaggcaaaataccccaggttaaacatggcgatatttttggtcatgaatttatgggggaagtcgttgaaaccggaaaggacgtaaaaaatttgcaaaaaggcgaccgggtggtaattccgtttgtcattgcttgtggcgactgttttttctgtcgattacagcaatatgccgcctgcgaaaataccaatgcgggtaaaggcgctgcgctcaataaaaaacagataccagctcccgcggcattgtttggttatagtcacctgtatggcggcgttcctggtgggcaggcggaatatgtccgcgtccctaaagggaatgtggggccgtttaaagtaccgcctttgctttcagatgataaagcccttttcctttctgatattctgccaacggcatggcaggcagcaaaaaatgcgcagatccaacaaggttcaagcgttgcagtctatggtgccggtccagtgggattgttgacaatcgcctgtgcacggttgctcggtgcggaacagatttttgttgttgatcatcatccctaccgcttgcgtttcgccgctgaccgctacggcgcgatcccgattaatttcgatgaagatagcgatccggcacagtcaattattgaacaaacggcaggtcaccggggcgtggatgcagtaatagacgccgtcggttttgaagcgaaaggcagcaccacggaaacggtgctgactaacctgaaactggagggcagcagcggtaaagcgttgcgccagtgtattgcggcggtcaggcgtggcggcattgttagcgtaccgggcgtctacgctggatttattcacggtttcctgtttggcgacgcctttgataaagggttgacgtttaaaatgggacagacccacgttcacgcatggctgggagaattattaccgttaattgagaaaggattactgaaaccagaagaaattgttacccactatatgccgtttgaagaggccgcccggggatatgagattttcgaaaaacgtgaagaggagtgccgtaaggtgattctggtacccggtgcacaaagcgcagaggcggcgcagaaggcggtttcaggtctggtgaatgcgatgccggggggaacaatatgatcgtcaggagtggttttcgaggtaaaggacagccatgacgataatcgccgccataatcagaaatcctatcaggatgtaaaatgcttctgccatggttattcccacaaacgaaacggaataattttgcagcaaaagtgaacagtgagaaccaggaaaaattgctgattttgcgtaaagaggatgcgcgtgcatcctctgggcaaagcgagttatcgcttgtgcagatgggattaaagcaggtagtcgccagcagcttctggctggtattcgagttccagcacttcaaggtgggttgcaacgccgcccggaagttcccagtgaatggaatcgccaacgcgcagccccagcagtgcggcacctaccggagccataacggaaagctgagtattgctatcggtcatttttgccggatacaccagcgtgcgcacacgcacttcgccatcgctaagattgcggaatttaacccggctgttcattgtcaccacgtcgtgtggcatctcttctggcgaacacatttgggcgcgatccaactctgcgtttaacgcgtcggcgattggcaaaccagcataggcgggttgctccagcagaatatcgatgcgttcggcatccaggtcgttaatgatgatagttggtctggacatttttactccatgtcgtcggtactgcgagtgtcgcagataaacatacccaaaagaaaaccctcaccgtcaggcggcgagggtttaactcacatgatgatactgactgttgctcactctttgaagtgatttgcgtcacattcagggaattcctcaatgcagcgcattatgtataattcttaatcgtcacggtttatggaagacgaattagcgtgttttgtaaatcagatgattaataacccactttatcaatcacaaaggttttgccacagttgcctgggtgtggttgtggcaagaatgagtttgcagaaagcggagcgttgatggcgtcagctttgatcgagatctgaatttcagtcaaatacgcagggttaccctggcacgttagcttaactgctttcacgttctcttttccccagcttttggcaaaggcggcgtcaaagtcacggcggctcactgttttaccgtaattatccgcaaggaattttccggcttcgctctctttaatttcttgattcaggcgtaccatcgtaccgaagtatgcgtccggatcaaaaccaaagcaggcaccgtgtttggcatattcgtagcgttccaggcaggaacgtccgccagctcctggcatgacttcacttagtttagcggccgtttccagtgataatccggtttccggcgatgaacacattcggctggcgcgcgcttctggtagattcgggattgggcgagtagcgcaaccgaagcgcatccagcggcgttcatcaacaccacgggcagcaaccgatttaggcaatcctggccacagaccatgtacggtcagaaaatcagctttgttggtcgtttcggtttgcaggcgacattcatctcgttcgttacgatttcgatcgtgttgactctggcaaaatccggtttgccaggagagggccaggacatagcgatcaaaatcgccatactgttttgcctgcaacgctacggcgttggcagaagagaagggaagcagagaaaccgcgagcaacgcggcgttacgccagaatgctttcataatgggtgtggaactcatacatacactgaatactatctattaaatcataaaaaagcccgccaggtgggctaacctggcgggcgtgatgatttattcagcgtttggcgaacgtattagttccacatggcgagaatcggccagccaaccaacagcaacatagagatgtaaatcaccccgaagattgcgccaagacgccagtaatcttttgatttcacatagccacagccgtaaataatcaccccaggaccggttgcatacggcgtcagacagcccatgataccgatagacagcaccagcaggatacacagttgttccattggtacgcccggaatacctttaccgacggccagaataaccggcagcatggttgcggtgtgcgcagacaggctggcaaacaggtagtgtgcaaagtagaacaccagaaccagtacaatcaccgttgcgtttggtgagaatccttccaggtgcgtactcatggtaccggcgaaccagtcaataaagccagaacgagtcaggccgttagccatcacaaccagagttgccaggttgaccagcgtgttccatgcgctgttatagcgggtaatatctttccaaggcacaacgtgcagggccagcattagcgaaactgccagcagaccaactgcagtagcattaatgacttcactgccaaaaacccacaaacctaagctgagcaatacaaggccaatcagtgtccactctctgcgtgtcagcgcacccatggttttcagttcatcacccgcccaggttgccacttcttcactgtgtgtgatttccggtttgtacagcacgtaggaaagccacggcgcaatgataagcaagataaccccaaccggcaggaagcagaggaaccactgcaaccagctaatctggataccggcaattttgctgacgaactccagacccagcacgtttggtgccgcaccggtgacaaacatggacgaactcagactggtactaatgaccatcatccacatcaaatagccgccaatacgacgcgcggacggatcgttggggaatgatttaaacaacggcggcaggtttttaatgaccggaaaaaccgtacccccggtacgcgcggtgttggacggtgtaaacggtgccagcagaatgtcgataatgacaatcgcataacccaacgtcagcgtgcgtttgcccatgaatttcaccaggaaaagggcaatgcgacgacctaacccggaaacttcataccctaatgcaaaaataaatgcgccaaataccagccataccgtggtgctggaaaaaccagccagaccccatttcagcgcctgtttttgcgcattaaacgctgggtcagctaattctttggcatcaaagagcaggtaattactgccaataacgcaaatagtaaccgcaataaaactgatcgctgttgccggaattggctcgaggatcatgccgacaatcattgccacaaacacagcgaagtaatgccatgcctgtggtggcataccgtcggggacagggataagaaacatgacacccatcaccaccagtggggccaatagtttccatatattatcttttgctaaagacatacgggttctccgaaaattaatattttcaaatttatcaagtgcttaaataattaaatctgtgctaaaaaccaggtaaggatcagcaggtcggcactgccgcctggactgagatttcgttcgatacactccctgtcgaactgccggagataatcgagatcggcgggggttcgaatgcccccttttgcaataatgtttgcgcctcgcgctgtagccagcgcaggcccccctcgccaccgcgcgaagcaacgttggtatcgccgttgatcgccatcagtaggagcaaggtatcgagcaatgccagttcaggatctaacccctgatccagcagagtgaggtaatgcggcaaggcgtggttgatcaccagtggataacccgcttcggcttcaccgcgtgcgccggtaaggccaagctgctggtacaaccgttgacctgccgtcagttgtgaattattggtacgcagttcgcgatcggtcagaccacggcagaaacttgccgccgtagaacaaacggttgttggcgttaccggctggttgagctgaagcaaacggccaattgccgcacatagcagccctaaagaaaaaatgctgcctttatgcgtgtttacgcccgcagtggcgcggaacatatcaccttcgcaagccataccaattgggcgtaatccgtggagtaccgcttccggtgccatttctgcactacaggcaccaaattcaatgaaacggggtaaccagccctgaatcgccagcgcgctgcggtggaaatcttccagcgccatatctttgtgcgcaccgcagttaatgcgatccacgaggcctggtttcggtgacagattgacttcagtcagcatggcgcgccagcccagcagggcgtactcatcgattaatgacgtcgcaagctttgtggttttagttgacgttgcaggcatcgacatcgttcagcagtgcctccatgcggttgagtaaatcggtcagttgatgggtttttccacgcgcgcagacggctgcgctttgctcgcacaacaggcagcggcgaggcggcagtgaatagtcgcggcgggagagaatttcgccttcgggcgtcaggacatcgatatcccataaccgcccgagaggatgactatgttcaagctcaatggtggcgagcttgaggtcgcgagccggggcggcaatgctcaacatgccctccggcccgctggcggaaaccagtgcagcctgctcctgaatttgccagccctgttttgcggctaaggcacgcaaggctgtcacgccatgattaaaaattcggcgtgtgacctcgctgtctttaatcggcccaggcgcaaccacggtaaaggagaccagtggaacaggatggcgcttgagccagacgtgttgccgtgcttgcctttcatcccggctgacgagcagctcgggaattgacaccgcatggtggctggcgagttcaggaagcaggtgcatggcttattccttcacctgatgcacaacatcgatcaccgagccatcgcggtaacgcacaacggcaacgacgcggtcggtgaattcaatcggctgtggttcaccggtcagcagacgcgcacgttcgcgcagccactcaatggaaaccactttaatgcccgcttcctgcagacgttctgccagttccggacgtgccgggttaactgcgataccgtggtctgtgaccagaatatcgacactggagcccggggtgatgcaggtcagcacgttatccaccagagtcggaatacgaccgcgtaccagcggcgcgacgatgatggaaagcgcagaggcaatcgcggtatcgcagtgaccaccggaagcaccacgcagtacgccgtcagagccggtcagcacgttaacgttgaactgggtgtcaatttccagcgcgctcagtaccaccacgtcgagacgatcaaccgatgcgcctttcgaaccccagttagcgtactggttggcgctgatttcgatgtgattggggttacgggccagcgattgcgcagcatggctgtcaaagctctgcacatccagcagtttgcggatcagacctttttcgtgcaggtcaaccatcgtcgcggtaataccgccaagggcgaagtcggcgcgaatatcgcggctacgcattttgtcttccaggaaacgggttaccgccagcgatgcgccgccggtgccggtttgcatggagaaaccttctttgaagtagcctgagttgacaatcacatccgcagcgctacgggcaataagcagttcgcgcgggttagtggtcatacgggtcgcgccagcgccgatttttgcagcatcgccaacgcggtcaactttgacgatcaaatcaacctgatcttgctcaatgcttgccggattatgcggataaggcagcagttcttcggtaagcatcacgacctgctttgcgttgtcggcatcaaccattgcatagccgagggagccgcagcaggctttaccggtgtagccgttggcattaccgaattcatcgcaggacgggacgccgaggaaagccacgtcgatattcagttcgccgctctgtaccagatgcacgcgaccgccgtgagagtggatttgcaccggttctgccagcagaccacgggagatctcttccgccagtggaccgcgcaggccggaggtataaatgcgggtaaccacgccctggcgaatgtgttctaccaacggcgcatggcaatcactcagggagctggacgccagggtcaggtttttaaagcccatcttcgcgatgacgtccatcaccatattgacggtcaggtcaccgccacggaaagcgtgatggaaggaaaccgtcatgccgtcctgtaaaccagagcgacgaatcgcttcttccaggttggcgcacagtttgcgatcgcgcgctttttcagcctggtaggtttgctttggcgagttctggaaagcggcaagatcgcattcagcgcgacgattccaggccgctacccgttcttgtcgttgagattgttcaattttctgcgtcattttgattgccttattcttcgcggatgccggaaagttctgcacgagagagcaccagacgggcgcgatcgataaccggaccgtccaccatcttgccgttcagggaaaccacgccgaggccttcgcgagcggcggcttcagcggcttctacgacgcggcgggcgtgatccacttctttctgggttggtgcgtagaggttgtgcaacagatcaatctgacgcgggttgatcagcgatttgccgtcaaagcccagctgtttgatgtgggcggcttcttgcaggaatccggcttcgttgttagcgtcggaatagacggtatcgaacgcctgaatacccgcagagcgcgcggcctgcaaaatggaacagcgtgcgaacagcagttcagttccttccggggagcgttctgtacgcaggttgcgcacatagtcttctgcaccgagggcgataccgatcaaacgctcggaagcgtgagcgatttccactgcgcgggtaatgcccagcggagattcaatcgccgccagcaggccggtgctgccgggttcacgaccacaggctttttcgatacgcaggatctctttttcaatatccagaacatcctgagcggtatcggttttcggcagacgcacaacgtccgcaccaccgcgaacgacggcttccaggtcgttaacaccccattcggaatccagcgcgttgacacgcacaatggtttcaatatcgcgatacagcggatgttgcagcgcgtgataaaccatgcggcgggcggtgtctttttcacgtaatgccacggagtcttcgaggtcaaacatcagggcatcagtcgggtagatgaaggagttgctgaccatcgcggcattggcaccaggcacaaacaacatgctgcggcgggtgcgagttttacgttgttgcagcgaagcggaaatcattggcaatcctcccatggcagagccgggataccgctggcgcgtgccagcagggcttccagtcgtgcacgtaaaatgcagtccagtgcgcctttgtcatcgacattcagctgtacgccgcgcacgttgtagcgggcgagaacgtccagaatggtggtgcgaattgcatcgccaaactgtttctcaacgctgctattgatttgcaggtcgatatcctgcgtatcgagtggggcgatgcgtatcatcacatccccagactcaagggtgcctgcaacggcgggctggtttattttcatttttcacctgtttctcatgcgggggtcttttgacgagctgccgcgtcctggcgggagtgctcaagcaggttctgcaaataatgcagcgtgactgcagggaccagcggcgcgatagccgtgagatcgtttttcgccagcagttgacgtacccgggaagcggatatcggcatctcctggtaacgcagccgctcaatttcaaccagttcgatgggcggtgcggagatagtcggcgtttccagccagtagcgcatatcctggttgtactgggcggtaacgcgacaaaagggttcagtaccgacaaagcggtgagttacacccagcgcgggagcgaggtactgacggaaaatcttcagatcaatttcggtgtaacaatggttaatgacgctctgttctttaatgaagtagcaagggaacgtagcgcgggagatgatgtattcggagccgcgatgcacagtcaggcgtggaatatcggcggtgccttttaacaccagatccaaccggtcttcataggggaagcgtgaagaatcttctttgactaaaaacagatgcaaccagtcgcactgtgccgcagcttgttgaatcagataacggtgaccattcgtgaagggattggcgttcatcacaatgcagccaatcttgttccctggatgacgaaattttttcagcgattcggcatagcgtttcagtcgcgtggcgctgttttccatcagcaccatcacgccgggtacgctggtcagcgtggaaaaaccgcactggcggaacagcgcctcgtattcggttttggtataaataaacagatgcgtgctgtgccgctcataggcgaggtttatcagttcagtggctaatgtcagcgccagtccttcaccgcgaacggattcactgatcgcaacgcatttaataatatttccggcaattccaccgcacgcgataagcttttcatcgcgggttacggtaataaatacttcgactgtggtgtcaacgctcaaatcattttcatgcaggaattgggcgatttccgccattttttattttctgaacgttttacgcgggtgaaaatatcattgccgaacataataaatagtatcctgaaggtgcatgttgttatcgatttgcaacgaatgttgttcaatgttgcaaactgataaccttttattttcacttgggagaaaggggggtgatcgaggtatatctttttctcctttcgctatacatcctaaggagtatttctgcgtgaaattttgatttatttcacatagagttagtggttttttatttatttaatggttttaagttttttaattaatgtaattacgaaatgacctgcaggtttaagtgatttaattgatttaatgaataaaatttgccacgatcataattaatatctatgtattttgattcaacattttaattacatccgtcaaagaggctcgggacaacccgtaaggaaaacaatgttgcagcttaacgagaataaacagtttgcatttttccaaagactggcatttccgctgcgtatctttttgctgattctggtgttctcaatatttgtcattgcagccctggcgcaatattttacggccagttttgaggactatttaacgcttcatgtacgcgacatggcaatgaatcaggcgaaaattattgcctccaatgacagtgtcatctctgcggtgaaaacgcgtgactacaaacggctggcgaccatcgctaacaaattacaaagagataccgattttgattatgtggtgattggggaccggcactcgatccgcctttaccatcctaatccggagaaaattggttatcctatgcagttcaccaaacagggcgcgctggagaaaggggagagctacttcattaccgggaaagggtcaatggggatggcgatgcgcgccaaaacgccaatctttgatgacgatggaaaagtcatcggcgtggtgtcgattggctacctggtgagtaaaatcgatagctggcgggctgagtttttattaccgatggcaggcgtgtttgtcgtgctgttagggattctgatgttgctgtcgtggttcctggcagcgcatatccgtcggcaaatgatgggcatggagccaaagcaaatcgcacgcgtggtccgtcagcaagaggcgctgtttagttcggtttatgaagggctgattgcggtggatccgcatggttacattaccgccatcaatcgtaacgcaagaaagatgctggggctgagctctcccggacggcaatggttgggtaaacccattgctgaagtggtcaggcccgccgatttctttaccgaacagattgatgaaaaacgtcaggatgtggtggctaactttaacggtctgagcgttattgccaatcgggaagctattcgttcaggtgatgatttgctgggggccattatcagctttcgtagtaaagacgaaatttccaccctcaatgcgcaactgacgcaaataaaacaatacgtcgagagccttcgtacattgcgacacgagcatctcaattggatgtcgacgctcaatggtctgttgcagatgaaagagtatgatcgcgtgctggcgatggtgcagggggagtctcaggcccagcaacagcttattgacagcctgcgtgaggcgtttgccgatcgccaggtggcggggctgctttttggtaaagtgcagcgcgcccgggaactggggctaaaaatgatcattgtccccggtagccagctttcgcaactgccgccaggactggatagcaccgagtttgcagccattgtgggcaatttacttgataacgccttcgaagccagcctgcgtagcgatgaaggaaacaagatcgttgaattattcctcagcgatgaaggcgatgatgtggtgattgaagtcgccgatcagggctgcggcgttccagagtctctacgagacaaaatatttgagcagggggtcagtacgcgtgctgacgagcccggtgaacatggcattgggttgtacttgattgccagctacgtaacgcgctgcggtggtgttatcactctcgaagataatgatccctgcggtaccttgttttcaatctatattccgaaagtgaaacctaatgacagctccattaaccctattgatcgttgaggacgaaacgccgctggcagagatgcatgcggaatatattcgtcacattcccggattcagtcagatattactggcgggaaacctggcgcaggcccgaatgatgatcgagcgttttaagccggggctaatcttgctcgataactatcttcctgacggcagagggattaatttattgcatgaactggtgcaggcgcattatcccggcgacgtggtgtttaccactgcagccagcgatatggaaacggtgtctgaagccgtacgttgtggtgtatttgattatctcattaagcccattgcctatgaacggctggggcaaacgctaacccgtttccgccagcgtaaacatatgctggaaagtattgatagcgccagccagaagcaaattgatgagatgtttaatgcctatgctcgcggtgaacctaaagacgaactgccgaccggcattgatcccttgacgctaaacgcggtgcgaaaactgtttaaagagcctggtgtgcaacatacggcagaaacggtggcgcaggcactgaccatcagtcgcaccactgccaggcgttatcttgaatattgcgccagccgccatctgattattgctgaaattgttcacggcaaagttggcagaccgcaacgcatataccacagtgggtgacatgataaagccggaggaaacttgcctccggcattactatttacttgcctgtgaccgctgctgccgttcctggcaccatcagctctgtagcaacgataacaatcaccaaaccaacaagcaccggtaccgaggtgcgttttacgacttcaaacggcgagatcttcgccatcccggcaaccgcaacgactacgccagaaacgggcgaaagggtacggcccaggtttgacgcctgcagcatcgggatagtcaaatacgccgggttaatgccggaagagtgcgccagtttcgggatcatctcaacaaacgcataaaacggcgcattgcctgaaccggtcgtgactgccgccagcatggtcagaatcaccaataccagcatcaggatgatactcgccgaaccaaacgaggtagcgatagaaatcagactttgaataaagccgatggtgctaagcccctgagcgaataccccagcggcaaccagcagcatcaccacgttagcaaacgcatctgccattccgcgataagccacttccagaccagagaaaactttctgggtattaaagctgcggaggaactccagaatggaggcaatcagcatacaaatcaccagaatagtgatgatgtgtaattgcggaccccatttaccgtcaaaaatcagtacaccgatgatcggcgtgaacggcaaaatggcataaaacgcaggagcagtggtggtgatttcactgacatctaacatttcatgagagatgtgctcttttttatccagataacgttgccagaagaagtgggcgatcgccatgccgataattgcagcaattgagataggcagcgtcgttttgaaggcgaagtcaatcagcgacatttcggaagcttgcgccgccagcaccacatcccctgaagtcggtgcgagaataatcgccgccggggaggcacaaatggcagcagctgcgccacgactgataccaacgtttaccatcaccggaaatagggttgccatcagcaaaacacccagaccggttgcggaagagacggccagagacatcagacaggcgacaaaataggcggcaatcatcagcaggtaaggggagttaatatactgcaatggttttgacgccagcttgaccaccatatcattcgcgccgatatgggtcatgtaagcggcaaatccacacagcatcataatcatcatgccgaggtcgccgccgcggctcattagtaatattttaacgtattcaacgatatccgtggcgctgtagcctgttgaagcctggctggacggtaacactttgtgccccataatggcactgataatcagcaataacaggccaccgacaaataacacaccagtggcggaataccctttaatgatgtagcgagctacacccacaataaccacaaccccaataaggagttcaatgaatgtcagcataatttttcctgtctccaggccccaaagtaaataataaaaaattcctaaagcttaaggaaaaaatatgcccaataaattggcgatgaatgctgattaaaatcaagaaaaactgccattaagacattgaagttgctgtttttatacatagataacaaaacgcatatttagcggttggcaattatcacataataatgtgtgtaaattgatggtggattgatgcaaatttgttaattgcaatggtgttagctgcggctgtgcgctcaaaaaataatctaacatgagcatgggttgacgatttatattatatacttcgttaagatgattgttgtatctagttaaaaaataaaataatttttccttgattgcattttgtcatcaaaaaagacttggtttttcttttttgactattcccatcgcagaaaacgacgcatcatctttaatcgatgcgcggaaatatttaacttgaacaagcggaaataaatagagcagctattcagattattctttatgttgggtctattaaggttatgttaattgtagctttgctatgctagtagtagatttttgataaatgttttatggtcacaaatgaacgtgagtaaatatgtcgctatcttttcctttgtttttattcagttaatcagcgttggtaaagtttttgctaacgcagatgagtggatgacaacgtttagagaaaatattgcacaaacctggcaacagcctgaacattatgatttatatattcctgccatcacctggcatgcacgtttcgcttacgacaaagaaaaaaccgatcgctataacgagcgaccgtggggtggcggttttggcctgtcgcgttgggatgaaaaaggaaactggcatggcctgtatgccatggcatttaaggactcgtggaacaaatgggaaccgattgccggatacggatgggaaagtacctggcgaccgctggcggatgaaaattttcatttaggtctgggattcaccgctggcgtaacggcacgcgataactggaattacatccctctcccggttctactgccattggcctccgtgggttatggcccagtgacttttcagatgacctacattccgggtacctacaacaatggcaatgtgtactttgcctggatgcgctttcagttttgagacaaatgaagttttagtaacttctttaaaatcaatagctaaaataagtaacatcaaaaataacgcgacttttatcactttttagtaaagttgcactggacaaagcgtaccacaattggtgtactggtaaccgacacagcatttgtgtctatttttcatgtaaaggtaattttgatgtctaagattaaaggtaacgttaagtggtttaatgagtccaaaggattcggtttcattactccggaagacggcagcaaagacgtgttcgtacacttctctgcaatccagactaatggttttaaaactcttgctgaaggtcagcgcgtagagttcgaaatcactaacggtgccaaaggcccttctgctgcaaacgtaatcgctctgtaagatacttcagcaagaattcaaaacccgcttaatcagcgggttttttttggtctttagtgtgcggttgaggccgaaaacagccagaaagccagtgctgtcatggcaaaagaccccagaaggttgacgaaaacgttcagtaacgcccagccaaagcggccctcttgtaacaaaaacaccacttctgccgaaaatgttgagaaggttgttagaccgccacaaaatccggtggtgattaatactttccacactggatcaatgttcgtcatcctgctgaaccaggcgaatcccattcctatgatgaatgccccaatcaggtttgctgccagcgtccccaacggaatcgcctgatgcagcgggttaaatcgcatacttaacagccatctcgccacgcttcccgtaccaccgccaataaaaactgctaaaagaagttgtaacactgcaaaatcctgctatttgatttgtatgagtgataagtgtaacgccgaataatcgtcgttggcgaattttacgactctgacaggaggtagcaatgctggttgccgcaggacagtttgctgttacatctgtgtgggaaaagaacgctgagatttgtgcctcgttgatggcgcaggcggcggaaaacgacgtatcgctgttcgtcctgccggaagcattgctggcgcgcgatgatcatgatgcagatctatcggttaaatcagcacagctgctggaaggcgaattcctcggacgtttacggcgagaaagtaaacgtaacatgatgacgacaattctgacgattcatgttccttcaacgccggggcgcgcatggaatatgctggtggcgctacaggcaggaaacatcgtcgcccgttatgccaaattgcatctctatgatgcatttgccattcaggaatcacgccgtgttgatgctggtaatgaaatcgctccgttactcgaggtggaggggatgaaggtcggtctgatgacctgttatgacttacgctttccagagctggcgctggcacaggcattacagggagctgaaatcctggtacttcctgccgcctgggttcgcgggccgctcaaagagcatcactggtcaacgttgcttgccgctcgtgcgctggataccacctgttatatggtggctgcgggggagtgcgggaacaaaaatatcggtcaaagccggattatagatccctttggcgtcaccattgcggcagcgtcagaaatgcctgcactcattatggcggaagtgacgcccgaacgtgtgcgtcaggtgcgcgcgcaactgcccgtcttaaacaaccgtcgctttgcgccgccgcaattattatgatgtttttttactcggcgcttgattcaccttgttacagattgctattgtgtgcgcgcgtcgaatgaccgttaatattctctggtttttaaggcgcgttctgttgccggttatatgtcaagaaggtatctatgggtgagattagtattaccaaactgctggtagttgcggcgctggtcgttctgctgtttgggactaagaagttacgtacgctgggcggagaccttggagcggccattaaagggttcaagaaggcgatgaatgatgacgatgctgcggcgaaaaaaggcgcagacgttgatcttcaggctgaaaagctctctcataaagagtgacgtggcgagcaggacgctccctcaatatcttgttcgatacaaaaaacccgcttcaaaaagcgggttttttatcagacagatgtaagtaattattacaggattacttaacttccatccctttcgcctgcaaatcggcgtggtaagaagagcggacaaacggaccgcatgcagcatgggtaaagcccatcgccagcgcttcggctttcatttcgtcgaactcatccgggctaacgtaacgttgaaccggcaggtgatggcggcttggctgcaaatattgccccagcgttaacatcgtcacaccatgacggcgcaggtcgcgcattacctcaataatttcttcattggtttcacccagtcccaccatcagaccagacttggtcgggatttccggatgcgcttctttaaagcgttccagcagcttcagcgaccagttgtaatctgcaccaggccgtacctgacggtaaatacgcggtacgttttccaggttatggttgaacacatctggtggcgttgcagtcagaatatccagagcacgatccatacgaccacggaaatccggcaccagagtttcaattttgatttgcgggcttttttcccgaatggcagtaatgcaatccgcaaagtgctgggcaccgccatcgcgcaggtcatcacggtcaacggaggtgataaccacataacgcagcgccatatcggcaatggtctgcgccagtttcactggttcattggcatcaggagctaccgggcgaccgtgggcaacatcacagaacggacaacggcgggtacaaatagcgccgaggatcataaacgttgctgtgccgtggttgaagcattccgccaggttagggcaggaggcttcctcgcagacagaatgcaggccatttttgcgcattgcggctttgatgccctggatacgtgtagagtccgctggaagcttgattttcatccattccggcttgcgcagcagggcttcgcgctctgttgccacgtttttaaccgggataagggccatcttatcggcatcgcggtatttaacaccgcgttccatcacaatgggtttactcatagcgtgcgtgttccagttgcgaattacgaaggaaagcgtttcaattcaatagattgttgtaattatcaactatttttgaattaacgactggcagtatatcattgaaacggacctgaaagcagccaaagcggtcgcgaaaatgtaaaattgttgttggattgtgccattttatcgttctgcgctgtgatctggctgtaacaatactttttcaaaatgcattacggataacatctattgctccgtgcaggatgggatcacgcaggctgaatttgttgtagtggatagagaaatctatttgctcctcatttaaggacggaaaaggcagtttttccagcggccagcagcggctaaacaggttataaaaacggctgggaataatcgctaacatgtcactgttggcaaccagtgcagcgattgtcaaaatgttgtagctggtgaaattgatttgccggtccggaaacatttcttgaactctctgccgcagaccgctgaaattttgctcttccggtaacagaagtacatgcgcagcgttgtcgatagtctctctgtcatcttctaaagagagtagtggatttccctcgcggcaaattaacaccatattgtcggtgaacagaacatgatgttgcaccgtacgattggtgcaaaacatgttatcgatgatgagatcggtttgaaactgactgagttggttttccgcgtcgctgatgggcgggttgcgcagtaaaagctgcggatagtgagttttaatcgcccgatagatgacaggaaggaccagggctccgaccgagggagtggtcgcaatagttatcgttcgttgcttatcatagcttccttcgatatccagcgcgccaagaatggactcaaggccctgactgatatactcatgtagatgcatcgcaaatgcggtaggagtgacaccctggcctttgcgaataaacaatgggtcagggaatataacgcgcagtttctgaatagactgactgattgccgagggggtcagattaagcactttcgctgcattaacgatccctttatgtacatatacagcttcaaaaatagtcagaaggttaagatcaatatttcgtaaggttgtaaatatttgtggtttaccttctgacgactttctgcttaaacagggttcaatttgattattactatccacgcacttactccaattttattcatggaaaaataatatttaaaaaattacaataatcttatgtctaattggaacggaacgcttttgctcaccataatcaactatttcaataggttaatcaatggagtgagttacggagcaaggcgtggcaccgcatttctgcaagtgataaagaaaatatacaaacgcgaaggagatgtaaagcattagcaggtattatgagtaatgacccagtgtaaattgggccattgaagtatggaattaagcggtaatatattcgaagtccggattgtttagtagcgctaaaatattttccagtaaacgtggagcaatattattagtcgtcgcttcgggtttccattgtgatattttagccatttccattccggcatacccacaaggattaatacgtaaaaatggtgaaagatccatattgacgtttaatgccagaccgtggaatgaacaaccgcgtcgaattcgtaaacccagtgagcaaattttcttttccccgacatagacaccaggcgcgtcagcccgaggatgcgcttctatacccagttcagccagggtattcaccactgtttgctcaagcaaggtcaccagttcacgcacaccgagtttacggcgtttcaggttaagcaacacatacatcacctgttgtcccggcccgtgataagtcacctgcccaccgcgatcgctctggatcaccggaatatcacccggcattaaaatgtgctccgcttttcctgcctgaccttgggtgaataccggatagtgctcgaccagccagatttcatcaagggtactatcatcgcgggtatcggtgaattcatgcatagcctgggagattggctcgtaaggctgaagaccgagctggcggacaagaattttatcctgatacaaaacggcatctccgtggagaatgagtaaaagtgggggaaaagtatatcacagcgaggagaggggagttacccgaccaggagccgggtaacggagaagcgagttacagaaccatgcggacaatatcgattttgcccagttcttcatacagtgtttcaacctgctcgatatgagtggcgttgatagtgatagataccgagtggtagttgcctttgctgcttggttttaccgttggggtgtagtcacctggcgcatggcgctgtaccacttcaaccacctgatcaaccagctcaggtaacgcctgccccataactttgtaagtaaaaggagtagggaattcaagcagttcgttaagtttggttttcatgtcagctccggcgtaacgtaattaaatagcaactcccgccagaaggcgggagtttttttactgatgcttagtatatggggacggaaattacactttcaagtgttcaatttttaaccaaaccagtgatggaacattaatttaatgtaatcaatgattttgccgaagaagttaccttccgggatttcttgcaacacaaccagcgggcgttgctcgatcgttttgccatcaagctggaagttgatagttccgacgacctgattcttttgcagcggcgcatgcaattcactgctgttcagcacatagctggctttcagatctttcatgcgaccacgtggaatggtcaggtacacgtctttatcaacccctaacgaagcgcgatcagaatcaccaaaccaaaccggttcagaggcgaactctttacctactttcagtgggttaacggtttcgaagaaacggaagccccaggttagcagttttttactttcggcttcacggcctttaaaagtacgtccgcccatcaccgcagaaatcaagcgcatctggccttcagtcgcagaagcaacaaggttgtaacctgctttgtcagtgtgtccggttttgatgccgtcgacattcaggctgttatcccataacaggccgttacggttcagctggcgaataccgttaaacgtaaattctttttctttatagatcgagtattcattcggtacgtcacggatcaatgcctggccgatcagcgccatatctcgcgcggagctgtactgaccatcagcatccagaccatgtaccgtctggaagtgggtatttttcaggcccagtgcgttaacgtagctgttcatcaagccaacaaaagcgtcctggctaccagcggcaaaatcggccatggcgacacaagcatcgttacccgattgcaggttaataccgcggatcagctgagaaaccggaacctgcatgcccggtttgaggaacatcagcgaagaacctttaaacaccgggttaccggtggcccatgcgtcgttgccgatagtgactaaatcagtttctttaaatttaccggctttcattgcctggccgataacgtaactggtcatcattttggtcaggctggcaggatcgcggcggacatctgcgttctgttcggcgagcactttgccggagttatagtcaatcaggatgtaggactccgcatcgatctgcggtacacccgggatcatagttttgatattcaggtcatcggcatgtgcagcagagataaaggctgtgcaaagagccgtggtaagcgccaggcgcttcatgatacgagcggaaaaaatggtattcatggtctgaactacgacatccgtgatggaattaaaaaagtgccctactatagcaaatgcactaccggcaggcatctgactttccgcgtgactttgttaacgtcatttacagaaattgacacatcagatgcctgctttacgctactgcgcggtagtaataaatgactgtaattgggcttcggtttgcaaacgttgctgcaaggtactggcttcggctttgctggcgaatgggccaagctggatccgccagaccgcgccattttgagttacgcgaccggggacgccgaacttctgtcccagttgctgttggtactgttgcgcacgagcctgatcgctaacggccccgacttgcaccataaagttgccgctggcgctttgcgaggcggcttgcggtgtcaccattgcaggcgaggttgcaggcgttgtcgacggagctgtaacaacgggctgtggcgcaggcgtcggttcgctgccttccagtacaccaggcgctaaggtcgttggagcgccgaggaaaccgctactggttaccggcgcgccggtcggatcttcgctttttagcgtcgaattactgaccggaagaatgtcaccctgcgggccagacactgaacttgttcccgcgccaccgcttaaatcgggaggtgctggcagggcgtaagtctgtttggcgactgtggtacaagccataccaggaccagaaagcgaaccatcctgggcgacaataatcggatcgatacgaactttggtgttgtttgacgtgttaagacggtcagctgccgcgcgagaaagcgaaataacgcggtcgttgccgtaagggccgcgatcattaatgcgcaccacgatcattcgcccgttagccaggttagtgattctggcgtagctggggatcggaagcgttggatgggccgccgtcagctgtgttggatcgaaagcttcgccagaggccgtcaggttactgcctggttcggcatcatagattgccgccagtcccgcctggctaaatcgagacggatcctgcacgattttatagcttttaccgtcgcgctggtaatcctgatttgccgtcgcgttcagtggttcgaaacgcggatccgccccgctaatttcaactatggggccgttacataccgcaggctgcggtacacttaccgtctgttgctgaccatcatcgcttgtacatgccgcgagcattcctgccgcgatgcagatcccgagccactgcttacgcattgcgcacctcttacacgcttttcgacaacattttcctgtgggtgtggattgacattacaatcccgaacccagccatcagcacaattagcgccgatcctccataactgaccagtgggagcggaacccctacaaccggcagaataccgcttaccataccaatatttacgaagacataaacgaataatatcagcattaagccaccagccatgacgcgaccaaaggtggtttgcgctctggcggctatccacagcccgcgcatgatcagcagaatgtagagagcgagcagaatcagaatgcccactaatcccagctcttccgccagtaccgcgaagataaagtcggtatggcgttcggggagaaattcaagctgtgactgagtgccgtgcagccagcctttgccgcgtaatccgccggagccaatagcaattttagactgaataatgtgatagcccgcgccgagtgggtctgattccgggtccaggagcatcattacgcgctggcgctggtaatcatgcatcaggaagaaccacagaatcggaatgaacgccgccaccagcactactgcgacgccaatcagacgccagctaaggccagagaggaacagtacaaacagaccggaaagcgcaacgaggattgatgttcccaggtcaggctgtgcagccaccagcagcgtgggcataaatatcagcaccagcgcgatgccagtgttcttcaacgatggcgggcaaacgtcgcggttgataaagcgcgcaaccatcagtggtacggctattttggcaatttccgacggctgaaaacgaacaataccgaggtccagccagcgttgagcacctttagagatggcaccgaaagcatctaccgccaccagcaaaataatacagatgatatagagatagggggcccagccttcataaacgcgtggaggaatttgcgccatcaccaccatgatgaccagacccatcgcgatttggccgattttacgctccatcatgccaatatcctgaccgctggcgctccagataaccagggcgctgtaaaccagcaatgccagtaagatcagcagcattgtgggatcgagatggactttatcccagaatgtttttttattcggattatccgtcatgattaatggtcctccgctgcggcaaccgctggattttccgcaggcagatcggtgttgttatcacccagcataatgtggtcgaggatctggcgcatcagtgtcccaaccgccggacccgcaccaccgttctccagaatcatggcgacagccacttgcggattgttgtatggcgcaaaggcggtcatcagtttgtggtcacgtaaacgctcggcaattttgtgcgcattataggtttcgttcgctttcagaccgaagacctgagcggtaccggatttcgccgcaattttgtacggtgcgctggcaaagtatttatgcgccgtaccgttagggcggttagcaacaccgtacataccgtctttcgccagctcccagtaaccggaatgaatatcgccgacgggcggttcatgcggctgtacccatggcacctgtttgccgtcttcggcggtgctcatcagcaaatgaggaaccttcacgataccgtcattaatcaggatcatcagtgccttactcatctggattggggtcgctgtccagtaaccctgaccgataccaaccggaatggtgtcaccctgataccacggttttttaaagcgtttctgtttccattcgcgggtaggcatgttgccggaacgttcttccgccaggtcgataccggtgtaatgaccataaccgaatttacccatccattcggagaggcgatcgatccccatatcgtaggccacctgatagaagaaggtatccgcagattcttccagcgatcttgtgacattcagacgcccgtggccccattttttccagtcacgataacgtttttccgaacctggcagttgccaccagcctgggtcaaacagcgtcgtattgcgcgtgatcaccccggcgctcaatgccgaaaccgccacatagggtttaactgtagacgcgggaggataaaccccctgtgtggcgcggttcaccagcggtgtattcgggtcgttcaacaaggcggaataatctttgctggagataccgtcaacaaacaggtttgggtcataactaggcgtggaaaccagcgccagcaccccacctgtacgcggatcggtgacaaccacagctgcgcggctacccgccagcagcgtttcaatatattgctggagtttgagatccagcgtcaggtaaatatcgtgtccggcttgcggtggtacttcttttaactggcggataacacgcccacggttgttaacttcaacctcttcataaccggtctgaccgtgcagcacgtcttcatagtaacgctcaatgcccagcttaccgatatcatgcgttgccgcatagttggccagtttgccgtcattattcaggcgttcgacgtctttatcgttgattttcgacacatagccgatgacgtgggtcaacgccgaaccgtaaggatagtaacgacgtttatagcctttaacttcgacacccggaaaacggtactgattgacggcaaagcgagctacttgtacttcggtcaggttagttttcaccggaatagaggtgaaacggtgtgaacgtgcgcgctcttttcggaatgcagcaatatcgtcatcggtcagatcaaccacgctgcgcaaagcgtccagcgtttgctgcacgttatcgactttctctggcatcatttctatctggtagatagtgcggttgagggccagagggataccattacggtcgtagataatgccgcggctgggcgcgataggcaccagcttaatgcggttttcattagagcgagtctggtagtcggtaaagcgaacaatttgcagattatacaagttggcgataagcacgccggtcagcagcaaaatccccaaaaaggcgaccagcgcccggcgcacaaacagcgcggactctgccgtatagtcgcgaaaagagttctgtagtttcatccgctgcgttttctactcaaagctcccttatcactcacggtgataaggatggttggtggtgatgctccacgcccggtacagactctctgcgaccagcacgcgaaccagcggatgggggagggtaagcgccgacagcgaccagctctgctccgccgccgctttacaggcaggcgacaacccttcaggcccgccaatcagtagactgacgtcgcgaccatccagcttccagcgttccagctcagcggctaactgcggtgtatcccagggcttgcctggaatatcgagggtgacaatgcggtttttgcctgcggccgccaacatctgctcaccctctttgtcgagtatgcgcttgatgtccgcattcttgccgcgttttccggccggaatttcaatcagctcgaagggcatatctttcggaaaacgacgcaggtactcggtaaaaccggtttgtacccagtccggcattttcgttcccacggcgacaagttgcagcttcacgcattaactccagagtttttccagttcatacaggcgacggctctcttcctgcatgacatggacaatcacatcgcccaaatccacgacaatccagtcggcgctgttttcaccttctacgccgagcggtaacaggcccgctgcgcgagactcctgcacaacgtggtcagcaatggacataacatgacggctggacgtacccgtacagatgatcatgcagtcggtgatgctggatttgccttgaacgtctaaggcgatgatgtcctgacctttgaggtcatcaattttgtcgataacaaaatcctggagtgctttaccctgcaagttttccccctgggtgaatcaaatagataaaaatggtctgtcagtatacctgaaccagaggcgatttcgggacaattgtcgccgaatcggctttcgaaagtgggctatcatcccaccccgcgccgcagattgcatcgccatttttgtaaaacaatttctacaaagtcgtgtctggcgaaaaaagtctggctgcggagaatatcagcctgcccgggtctgtcaatggtcgttgcggcttacccgtaaaaaaacagaaaagtcatgcattctcgaccccgatggcacggctattgaggacgcgtagcgtcgcgaatttttggttgatatcaatggtgctccaacacccctggtcaacgcggaaatgccacatagcctcggcaggcatgccaattaaacgggcgattaacagactcagtacaccctgatggctgacgactaaaatattctgatagtgctgaaattcactaagccttgcgataaagcgttccacacgttgcgaaaatgcctgaaatccttcaccgttcgtggggattgcatgctgccagtcattgcaccacgcgctatagttttcggcatcttcttgcatgaggtcgcgatgatgtcgcatctcccagtcgccaaaaaacatttcgttgagttcagggatgatttgcacggggagctggcggtcactgagaaccagtcgcgcggtatgctgtgcccgttccagttcactgcataaaaccagatcaaaggaaacaccatgtagcagcgtatgcagattttgcgcttgctcaataccgcgtgcggtcaggggtgtgggcgcatgaccgctgtacagaccatcgacattcgcttgcgtttcgccatgacgaattaaccacagtcgcatcatgccctccgtaacgacaggtatcagcgatacaagccttgttggttaatgtaagtcagtaccggttccggcaataaatcctcacacgattcaccgttttgcaaacgttcgcggatgatggtcgccgagatgttaaaccacggcgtttcagccagataaattttaccggcaggctgaaggtgaagatcttccgggttatgtgtcaaatgatcttccagccattgctggtattgcggttgcgccatttcaagtgggtaacctggacgccgacagacgatcaaatgtgcattgtcgagtatcgtttcgtattcgtaccaggtcggaaaggtcagcaatgaatcctgaccaataataaacgccagcggcacgtccggcccttgttcctgccgccactctttcagtgtttgcgcagtgtaagagggggcattgcgctttagctcgcgttcatcaagagtaaataatggcttgtcggcaatcgccagttcaagcatgtgtttacgctgcacgctgttcgcttccggctggggacgatgcggaggaacattattagggatgattgtgacccgcgtcagaccaatcaaattcgccagcgtttccacgggtttaagatgaccatagtgcaccggatcaaaggtgccgccaaacagagcctgtaaagatttcatatcaaccgtcgataaatacgtccgccaggggtttatggcacaacagaagagataacccttccagctctgcccacactgactgaccgtaatcttgtttgagggtgagttccgttcgtgtcaggagttgcacggcctgacgtaactgcggctggcttaagcgatttaacgcctcgcccatcatgccccggcggttctgccatacccgatgcttatcaaacaacgcacgcagtggcgtatgggcagactggcgtttcaggttaaccagtaacaacagttcacgttgtaatgtgcgcaacaaaataaccggctcgctgccttccagacgcagttgctgaagaatatgcaacgcgcgcttactttttcccatcaacaaagcatcaacccaatgaaaaggggtgaaatgcgcggcatcattcaccgcctgttcaacgcgcggtaatgtcagtttgccgtctggccagagcagcgataaacgctccagtgcctgagccagcgccagcaggttaccttcataacagtagcagagcacctgattcgccgcgtcatccagttctaagttgagctgttttgcgcgcgcagcaacccagcggggaagctgagcctgctccggtgtctgacaggtcacctgcacgctgcgattcgcaagagcagtaaaccaggcggcattttcttgcgctttgcttaatttattaccgcggacgatcaacagtaggtcgtcatgcagaagtccggtgagtgtgagaagttgttcattgatcgccgcattcggtccgttttctggtaacaacagcaatagcgtttgtcgactggcaaacagactcatagcctggcataacgaaaagatcgcattccagtcagtgttgggatcaatggaaaaagtgtggtgttctgcgaatccttgtgccgcagctacctgacgaacagcgtcctggctttcctgcaataacagaggatcgttaccaagtaaaagatacgccgcgcgcagcccttcattgagctgcgcgcggagttgttccgggtacaaccgaatcatcagttacccagcgtggtggagacgcgtgcaggcgttgccggagtatccgttgtggtcgacgtctgttcttcgtcggaacgaatatccgcagcacggatgcttggcagcttacgaatcagctgttcggcagcacggtcgtacatctcttttacgatcatgtcttgttcgttatctttcgctaacgccatttgcgggttatcaaagaacgaacggaagactttggcgctaatcgggtagatatcacggccggggatcaacacggtcgcattcaccgtcatgatcatctgatactctgctgtttgaccgttacggaataccgatgcggtatctttcgcgatgctcactttacccaaacgcagggatggaacgtccttacgcgtggtttctttatcaagcaactcgacaccattcagacgtaactggttacgcaccgcacggcttaatggcccgttcggatcgcctgagtccaggatcatgaccttcatagtggaaggaacctgcgtggtatcacgcagatgccagccacacccggcggtgattaacaccgccagagataacaacaatgttgccagatatcgcacgcttcctcccgcgcttagccaacgaccagattgaggagtttacctggtacgtaaatcactttacgcacggtaacgccatcaagatattttgctaccagatgttcctggccagcacgttcgcgaacctgttcttccgttgcgtccaccggaacggtgattttggcacggactttaccgttaacctgcaccacgaccagcgtggagtcttccaccatcgctttttcgtcagcaaccggccacggcgcgttgtcgatatcgccttcgcctttcagttcctgccacagcgtgaagcagatgtgcggggtgaacgggttaagcatacggacaacggccagcagcgcttcctgcatcagagcgcgatcctgctcgccatcggttggtgctttcgccagtttgttcatcagctccataatcgccgcaattgcggtgttgaaggtctgacgacggccgatatcatcggtcactttagcgatcgttttatgcacatcgcgacgcagcgctttctgatcttcagtcagcgcatcaacgttcagtgccgcaacatcaccttttgctgtgtgctcgtaaaccagtttccagacacgtttcaggaagcggttagccccttccacaccggattcctgccattcgagagtcatatcagccggagaagcaaacatcataaacagacgaacggtgtccgcgccgtaacgttcaaccatcacctgcgggtcgataccgttgttcttcgacttggacattttgctcatgccggtataaaccagttcatggcctgccgcatctttcgctttcacgatacggcctttctcgtcacgttcaacgatagcatcaaccggggaaacccagttacgttcgccgttttcgccaacatagtagaaggcatctgccagcaccataccctgacacagcaactgtttcgctggttcgtcagagttcaccatgcctgcatcacgcatcagtttgtggaagaagcggaagtagagcaggtgcataatggcgtgttcgataccaccaatgtagatatccaccggcagccagtagttagccgcttcggaatccagcataccttctttgtactctgggcaagtgtagcgcgcatagtaccaggaggactccataaaggtgtcgaaagtgtcggtttcacgcagcgctggcataccgttaacggtagtttttgcccactccggatctgctttaatcgggctggtaatgccgtccatcaccacatcttccggcaggatcaccggcagctggtcgtccggggtcggcattacggtaccgtcttccagcgtcaccatcggaatcggcgcgccccagtaacgctgacgagaaacaccccagtcgcgcaggcggtagttcactttacgctcgccaacgcccatcgcagtcagtttatcggcgatggcgttgaaggccgcttcatggtcaagaccgttgaattcgccagagttgaacagcacgcctttttcagtcagggcttgctgagaaagatctggctcagagccgtcagcagccaggataactggtttgatgttcaggccgtatttagaggcaaactcgtagtcgcgctggtcgtgacccggaaccgccataactgcgcccgtgccgtactccatcaatacgaagtttgctgcccaaacgggaatttcttcgcccgttaatgggtgaacagctttaaagccagtatcgacgccttttttctccatcgtcgccatttcagcttcggcaactttggtgttacggcattcgtcaataaaggccgccagttcaggattattttccgccgctttctgcgccagcggatgacccgcagctaccgccaggtaggtacaacccataaaggtgtccgggcgggtagtgtaaacggtcagcgtgttgtcatagtcgttaacgttgaaggtgatctccacgccttcggaacgaccgatccagttacgctgcatggttttaacggtgtctggccagtgatccagtttatccagatcgttgagcagctcgtcagcgtaagcagtgattttgataaaccactgcgggatctctttacgttcaactttggtatcgcagcgccagcagcagccgtcgataacttgttcgttcgccagtacggtctggtcgttcgggcaccagttgaccgcagaagtcttcttatataccaggccttttttatacagctcggtgaagaatttctgttcccaacggtagtattccggcgtacaggttgccagctcgcggctccagtcataaccaaagcccagcattttgagctggtttttcatatacgcgatgttgtcgtacgtccacggtgccggagcggtattgtttttcaccgccgcgccttccgcaggcagaccaaacgcgtcccagccgatcggctgcaggacgtttttgcccagcatacgctggtagcgggcgatcacgtcaccgatggtgtagttacgtacgtggcccatgtgtagtcgaccagaaggatagggaagcatagacaggcagtaatacttctctttgctctcgtcttcggttacttcaaatgtgcgcttctcatcccaatgaagctgtactttggattctatctcttccgggcggtattgctcttgcatggcagccagtggtcctgttttcaatacggctacaaatgtagcgttgaggtggtttttcagatccgcatagcatagcccaaacgtccgcgtcaaaacagcctttcgcgcactcgacgttgaaatgatgcccggattattcatacattaatttacagagtttgtgggcgtattagcaaagcaaggaacaaagaacgtctattattatagtcagttaacgacccgggagatgaaacgatgaacaaggttgctcaatattaccgtgaactggttgcgtcactgagcgaacgcctgcgcaatggcgaacgtgatatcgacgcactggtggaacaggcgcgcgagcgcgtaataaaaacaggggagttaacgcgaaccgaggtcgatgagctgacgcgagctgtcagacgtgacctggaagagttcgccatgagctatgaagagagcctgaaagaagaatctgacagcgtctttatgcgggtgattaaagaaagcttgtggcaggagctggcagacatcaccgataaaacgcagcttgaatggcgcgaagttttccaggacctcaatcatcacggggtttatcacagcggagaagtggtagggctgggaaatctggtctgcgagaaatgtcacttccatctcccgatctacacaccggaagtgctgacgctatgcccgaaatgtggtcatgaccagttccagagacgcccgtttgagccgtaatagtctgatttcgcacagcaataaagagaatatgggccgaatgaaattccccggcccttgtttttatctctacagtaaatcttcagtctcacgaatttcctgactgacatctctggttccggatgactgaactttacgatacaggtcgagagcctgtcggagatcgacaggtcttccttctccgtagtgatacataatggccaggttataccaggcagtggcgtcattgcattcagcggctttcgtaaaccattcaaaggcagcctgataatctttctcaacgccttgtccgtgtttatacatataaccgatgttgacgtaagcgccgacgctcccctgagcggcagccttcagataccagtacatcgcttgcttatagtcctggtccaccccttcgccagcgttataatcccatgcaatttgaaactgagcatgccgattaccctgctgtgcgcttttcaaataccagaatgctgcgagtgtcttgttttgagcaacgccttttccgtcttcataaagatcggccagattgttttgcgcgtcactatggccttgtaatgcagcttgtttgtaccagaaaaatgccagcgcatagtcttttgcgactccgttgccatttctgtacatccacccaagattattttgcgcataagacattccgctctccgcggctatctgataccagacaaccgcttctttataattgggggcttctccacgatccagtgtccagccaagggcgttggaagcgaaagtatggccttgtagggcagcttttttcagccagaagatggcttgctcattatctttatgacggcttttatcctcggtatacttttgccctaaggaatactgtgcttcacaatgaccttgctcagcggccagcttcagccagtaaaaggctttttcgtcgtccggagaatcaattgcgctatcgcgattataataaaacccaacaatatattgagcctcgcaatcgcctttttcagcacgttcgataatctcatctattgataaattatcgcagcaacttgacgtgaaaatcattatcatttccttatggttgcagataaaacatattatatttttatgtgttccatttttgcgtaagccttattttatgcgtattatgtcgcgtcagaaaagtataaataaacgagcctcgcaatgcggctaatattcatttaatgaatatttaaggataaattatatggacatggagtcgcaaaaaatattgtttgcactttccactccgatggaaatacgcaatgaatgctgtttaccttcgcattcatcacccaaaatgtatttaggtacatgcttttttgacctttcttcctcctggggaattgatgcccgtgatgacctgctgcgcacaattcaccgaatgatcgataacggtcatgccgctcggttggcagggttttatcaccgctggtttcgttattcgccatgtgaatggcgtgactatcttgctgaactaaatgagcaaggtcaggcttatgcgcaatttgtcgccagcaccgccgaatgctgtggtgagggaggaattaaagcctgggattatgtccggatgggttttttaagccgaatgggcgtacttaataactggttgagcgaagaagaaagtctatggatccagtcgcgcattcatctacgggctctacgttattatcgtaactggcggcaatactttgccggttatacctttggtcggcaatattggcagtctcccgaagatgatcatctgcagttattacgcgaattcttagcgcgtaaagaatacgacgattccggcaatgatatgttttatcaattatttgccagtgatgatgcgtattaccctaccttgtcctggcaaccattggcttactattctgcatgcccggaaacgcttaaggatatgagcgacctatgaaaaattgctggaagattctcgaaatagaggaaacgactgacgtcgatattatccgccgcgcttatctggcgctgttaccgtcctttcatccagaaaccgatccgcagggttttaaacaacttcgtcaggcgtatgaggaggcgctccggattgcgcagtcgcctgctaaatctgtttggcaaccagaagaatatgaggtagcagaacatgaaattctgctcgcctttcgcgcgttacttgcctctgatagcgaacgttttctgccctccgcctggcagcgattcattcagcaattaaattattgctcgatggaagatattgatgaattacgctggtcgctgtgcacaatcgccatgaacactgcccatttatccttcgagtgcgtggtgttattagcagaaagattgcggtggttgcaggaggaaaacgtcggggaaatagacgaagaagaactggaatcctttttatatgccattgcgaaggggaatgtttttaacttccagaccattctgcatctgcccgttgccgtgcaaaatgacaccatcgatttttaccaaatgttcgctcggatttggtcatcgcatccagaatggctgacattgtatttagcgcaacatcgcgcagtgatcatccccgatgatgcaaaactgcacagaaatttactccgctggtatagcgcaggtcgcctggatatccccgaacttctggattacgcccggtcgtggcgggaagctgaacctgataatgaagatgcgcgttattatgaatacgcgcaacgcgtctattgtggagaaggcgaaagcttgctggcagaactttgtgactactggcgcgagtatccctccacccaggcggatgctttaatgttgcaatggtgccgtcagcatcgggtcgattattacccattagtggtgatgatgattgaagcgcgtgatctggttaacgataagggaaaaccgctactttatgtccccggcgacagcgcccgtacgcgttttcatttatacgaaatactcagcgatgaaaaactctctgcgctggggcgttcactggtcgagatggttttgcacaaaggacgtaagccgcggatctcactcacgcgtgatacagaacatcccttatggccattatatttagttgccaaacaattagtgcaggccagccaaccgacagaagaatcattaatgccgattgtgagccgccttgatgcagaagatcgttgtccactggaagcattaattattcgtcgattattaattcaggcggcgaattttaccggtcaggaaaccgtcgagccggagccgcaaccgcagccaatgcccgttgacgatggcgggctgggctgtctgggcgtcatcaaaattattttctacatttttatctttgccggtttgatagggaaaatactccatctcttcgggtgacagtcgacgttaatgtgcgggaagtccggcaagtaatctttccgcatttttgtaatgttgtttggcggccagttttaaccatttttgagattcataatggttaacattaataccagtgccatttctgtagatcaaacccaaagtatattgagcatgagcatacccttgttcagctgcttccttataccagagaattgctttacgggtatcgggtttgactcccaggcctttcaggtagatccaccccagtttgctttgtgcgcgcggattttcctgttctgctgattgctcataccagtatctcgcctgtgtataatccagtggtttaccgtcgctaccatgaagataaaattcgccaaggcgatattgcgatgttgagtgaccatgaatcgcggaaagctccgtggctgccgtggttaacggtagactgcctggtgagcttaaataatcaaaggcataattcaccatggctttatcacgcaacgttgttttcttgggttggctaatacaggtaattgctgcaactataaatattgcgaatatatacattaattttttattcatatgtgaatacttcgattttctttttattttgaaagcgtcaagtttatactcatcaataataaaaagtagtcagttaatgcacttaagggattattaacaaatgaataaggaagaacaatatcttctttttgcgctttctgcgcccatggaaatacttaatcagggttgcaaacccgcgcatgactcgccaaaaatgtataccggtataaaagaattcgatctctcatcatcctggggaataaataatcgtgatgatttaattcagactatttatcagatgactgatgatggtcatgccaatgatttagctggcttatatctgacatggcatcgctcttcccctgaagagtggaaagcattaattgctggtggctcggagagagggttgatttatacccaattcgttgcccaaaccgctatgtgctgtggagaagggggaatcaaagcctgggattatgttcgaatggggtttctgtcacgggtcggtgtgctcaacaactggctgacggaagaagagagtttatggctgcaatcgcgcgtctatgtacgagctcaccattactatcacagctggatgcactatttttccgcctattcgttaggacgtctctactggcaatcttctcagtgcgaagacaacacttcgctacgcgaggcgctaaccctgtacaaatacgatagcgccgggagtcggatgttcgaagagctggcagcgggaagcgatcgtttctatgccacgcttccctggcagccattaactgtccagcctgaatgcccggtaacgcttaaggatgtgagcgacctatgaaaacatgttggcaaatcctcgaaattgaaagcacgacgcaaatagacattatccgccaggcttatcttgctcgcttaccgttatgtcatcccgaaaccgatccgcaggggtttaaagcattacgccaggcctatgaagaggcgctgcgactggcggtaaatcctgtcggggaagcagataatgaagataaagatgccgccgctgaacatgaaatactacgtgcattcaggacattactggattcagaaagtgatcgttttcagccctccgcctggcagaaatttattcagcaattaaatacctggaacatggaggatgtcgatcaattacgctggccgctgtgtgcaatcgctatagaagcgcgatatctttcattaaattgtgcttctttgctggcagagcgtttgaactggcattcgtttaatgacagcgaaggaatggatgaggaagaaagggaggcttttcttgaggccattcaggctggtgattgtttcgatttccttagccttctggaatatcccgtcgcgttacagaaccagactgttgaatattacttcgcgctggaacgttgctgccgttaccatcctgactatgtcactgcgtttttggcgatggaaggtccgtggttcattcctgatgatgcaaagttacatcgcaaactgttgcgctggtacagctcggtgcaaacaggtatggcggaactcattcctgtagccaaacagtggcaagcggaagaaccagaaagcgaagatgcccggtattaccagtgtgcacaacgtttgtactgcggcgagggggaaagcctgcttgctgagctctgcgcatactgggagagttacccatctacacaagctgataatttgttgttgcagtggagcaagcgtcattgcccggattatttcgcgttattagtgatggttatcgaagcgcggagcatggtagatgcgcaaggtcaaccgctgaaatatgttcctggtgagagcgcccggacgcggctgttatgggcggaaattttacatagcggaaaattatcgccgttaggtcaatcgtttattgagtcgttattcttcaaacgcaaagcatgggcgtggtggaaatcgagagtcggtagcgagacagaagaagattcaccgttactggatttgtatcgggtagcggaacaggtagtacttgaagcgtttccgaaacaagagatgctggcccgtcttaatacaaggctggaaggcggagatgctcatccattagaggccattatcacccggttgctgttgacgaaagtaaaactcgagccggaggatgaagatgtcgatgagccaacacctgaaaaccatgaagaaaaaaatgatgagggtgaaaaaccacagagcattaccagcattatcaaaatcagtttaacggtgctggttataggttatgctctcggcaaaatcgcgatgttgtttagttgacgatgtgttttttgcgccgatgccggatgcagcatttacgccgcatccggcagccgtgattatgaggtctcaatggctaaataaacgctcgcccgccgcctgacctcatcgacgcgggccatatcgtttgactgcagcgccgcatcaaaatcggtgatcacccggccaatctcttctcgctcgtcacccagcgcccgcgcccacaactcttccagtttggctttaaaggtgcgattgatgagcatatcgcgcggataaattttcaatgcggataaccgcgtccgactctcttcaatctgctgcgcgctcaatgttaccgggctgtggttaatcactctggacttaacgctgccgtcttccagaagcacgtcaacttcaagcaacccgttgatatcataactaaagcgaatatcaatcgactgataagccccggttttcttcaacggcacatcgaaggattcaaccagaatgttatttttaactttgtggttttctccctgatagacgttaaccgtaatagaatcctgttccgggtgcatggtcgagtaagtttctacacgcgacaccggtactgtggtgtttcgttcaataattggcgagaaaatgccggaaatgccctggcggttaacttcaacgcccaacgagtaagggcaaatatcagtgaggatcacctcttcaatatcttcactgcgtaagcggcaggcggcctggattgctgcgcccagcgcgacaatggtgctcgggtcgtaactttgatacggtaatttgccaaacagacgcacggcgattcgctgcaccagcggcatttgtgacgcgccgccaaccagcaccagactgtcgatttgactcggcttcagacgtgcatcgcgcaacgcctgttcaatcggcactcgcaagcgattgagcagcggcaaccacaaatcttccagttcgttctcgtaaaattcgcactcccgcgtttcatcctggtactgccagcgaatgtgcaatggcgattgattgctacattttgccgcttccacacaggcgtacaaggctgccagttcactctcgttaagcgtggtcctggcgacatccgcgcgctttaaaacgtcatcgaccaacatatgggtaaaatcttcgccaccgaggaagttatcgccagcggaggcgtgaacttcaatcaccggcgtggcgtattcgagcaccgtgacgtcaaacgtgccgccaccgagatcaaaaaccagcgagcgggtattttgttgcgtatgcaggccatatgccatcgcagctgctgtgggttcattaattaagcgtaccgcatttaacccggctaactccgctgctaaacgggtatgcttgcgttgttcatcgctgaaataagccggaacggagatcaccacatctttaatcggacgttgcagaaattcttcggcatcttcttttaatgagcgtaataccaaagaggacagttctggcgcgttaaatgtgtcgctgcctaaccgccagttggtattactgcccattgcacgtttaaataacgctgccgttttatccggatgcgaagtacgccgtgatacagccggttttccgactaaaatatgattattttcatccatgctaattatggatggtgttaaatattcaccgaacttatttggaattaattgcgcggcaccgtctttccagacggcaattaaactattggtagtaccga

SEQ ID NO: 115 - DNA, 62946 bp, Escherichia coli
taattatggatggtgttaaatattcaccgaacttatttggaattaattgcgcggcaccgtctttccagacggcaattaaactattggtagtaccgagatcgataccaatggcgagttctgcattatccattgcatttatatcttgaaagaaaaagagataaacagattaagaccacccaggtaacgcgtggtgatcttaatcaatgacgtgtgttaagcgtaaaatttcagacgatcagccagtaaatcaacaaagccctgacgatcaacatcgaccattacggtggcattcggtttattgccagtcagataataataatcaacaaccgtcataccctgagtatatttcccctgtgtttccacgccaacccagcgctcaacagtggtaaacaactccggtttcaacagccaggcgatggtgcatgggtcatgcagcggtgcgccgacaaagccccatttttcgtctttatgatattcgaggaagaaatccagcagttcggcaacaatggttgaaacagggttgccaatcgcgcggaaacgctcagtgtcttcaacgtggatttgtgctttgtgagtaacatccagaccggccatcaccaccgggatccctgactggaagacaatttctgccgcttccgggtcaacgtaaatattaaattcagccgcaggcgtccagttaccaagccccattgcgccgcccataatcacgatacgggcaattttgctatgcagttccggatggctattgagcagcaaggcaacgttagtttgcggtccggtagacacaatcgtgacaggttccgcactttcacgcagcgttttcgccattagctctaccgccgtacagttttgcggtgcgaacgccggttccggtaatgccgggccgtcgagaccgctttcgccgtgcacattgtccgcgataatcaactcacgcattaacggttttaccgcgccgcctgctaccggaatatcggtgcgattgagcaaggtcagcatacgaagaacattgcgtaaggttttttctggtgtctggtttccggcggaagacgtaattgctttgacatcaagctctggtgaggcgagggcgagaactattgcgatagcgtcgtcatgacctgggtcgcaatctaacagaattggcagtgccattgttgctccttgttgtgtgcttctttgcgacaagggtaacgccaggatgtaacagatacgaggggcgaaacgataaagcgtgagatggcgcgcacttgggtatgcgcgccagagtgattaatgcaggattttcgcgaggaagtcttttgcgcggtccgatttcggatcatcgaagaaagcgtctttcggcgagtcttcgacaattttaccctcatccataaagatcacccgattcgccactttgcgggcaaagcccatttcgtgggtcaccaccatcatggtcattccttcgttcgccagttccaccatcacgtccagcacttcgttgatcatctccggatccagcgccgacgtcggttcgtcgaacagcatcgcaataggatccatacacaatgcgcgagcgatcgccacacgctgctgctgaccgccggaaagctgcgccggaaatttattggcatgtgcggaaagtcccacgcgctccagcaatttcaatgctttttcacgagccggcgctttatcgcgtttaagcactttcacctgcgccagggtcaggttttcgataatcgacagatgagggaacaactcaaaatgctggaacaccatcccgactcgggaacgcagctttgccagatcggttttcttgtcgttaaccacgataccatcgacggtgatttcaccttgctgcaccggttcgaggccgttgacggttttaatcagcgttgattttccggaaccagacgggccgcaaaccaccaccacttcgccttttttcacttcggttgagcagtcggtcagcacctgaaagtgaccataccattttgaaacatttttcagggtaatcattatgctgtccttcttttcaagtagctgaccaacaacgacgcgctaaggctaataacgaaataaacaaatccggcaaacaggatcatctcgacctgcgtaccatcacgctcaccaatggttgaggcggtacggaagaaatcggccagagataacacatacaccagtgaggtatcctggaacagtacgatgccctgagtgagcagcagcggcaccatcgcgcggaacgcctgcggcagaataatcagtttcatcgactgccagtgagtcattcccaacgccagcgcggcgctcgactgaccacgagaaatactttgaataccagcacggataatctctgaatagtaggccgcttcaaacatcgaaaacgccaccatcgccgaaattaaacggatatcattttttggcgataatcccagcacgttttgcagaaaacccggcacgatcaggtaaaaccacagcaaaaccataactaaaggaatcgagcggaatacgttaacgtaggctttggcaaaccacgctacgggcgcaaagctggacaagcgcatcaccgccagcatggtgccccacaaaataccaatcacgactgccgtgacggtgattttcagcgtgatcaccagcccgtcgagcagatatggcagggaaggaacaatggaactccagtcaaactcgtacattatttgccccccatgttgccgggcaggcgaactttacgttcaaccagcgtcatcaccagcatgataaccgcgttaatcaatacatacgccagcgtaatggcggtaaacgactcccaggcgtgagccgagtagtcgagcaatttacccgcctgcgctgccatatccaccagaccgatagtcgaggcgatggcggagtttttcaccaggttcatcatctcggaggtcatcggcgggacgataacgcgataagcattaggcagcagtacatagcggtaagcctgcggtagcgtcaggcccatcgccagcgcggcattcttctgcccacgcgggagcgactgaatagcggcgcgtacctgttcgcaaacacgggcggcggtaaacagcccaggcagagcatggatgaaaggaaaaactgaatattgggatccagctcggccttaaaccacatgccgattttctccggcaacagctccgggatcaccagataccaggtaaagaattgcacaatcaacggcacgttgcggaacagttcgacatacaacgtacccagaccggagagaaaacggtttggaacggtacgtaaaatgccgaaaaatgaaccgacgaggaaagcgataatccaggcgcagatcgacaaagcgatcgtcacctgaaaaccactccagatccaaccaagataggtggtgttgccgaacggggcttgttgtaaaaaaataccccagttccagtctatagacataaatctactccagaaaaaagagggtagcagcgttaactgctaccctcgaagattgttacccagcgtattgcggttttcaggcccgatggggaacgaccatcaggcgtatagtctgtccgtgctacgtaacaatcgagagggctggaatttccgcccctggttcttgtaattagttcagtgccttgtcattcggttctttgaacagtgctttcatttcgtctgacagttcgaaattcatgttcaggtttttcggcggaattggatttttgaaccatttatcaaaccatttttccgcttcaccggaggtctgcacctgagcgatggtgtcatccatcagctttttgaactgcggatcatctttacgcaacatacaaccgtaggcctcctgagactgccggcttgccgacgatttcccagttgtctggtttcttcgctttcgcacgttcaccggccagcagagcgtcatccatcataaaggcaacggcacgaccgctttccagggtgcggaaagagtcaccgtgatctttggcgctgatgatgcgcatattcattttttgctcttcattcagtttgttgagcaaaacttcagaggtagtgccggaagtgacgactacggctttgcctttcaggtcggcaaaatctttgatatcgccgccctttttggtcagcaggcgcgtaccgaccacgaaaatagtgtcagagaaagccgcctgtttttggcgttcgacgttgttggtggtagaaccacattcaaaatcaaaagtgccgttttgcagcagcggaatacggttttgtgaggtaatcggaatcagttttacctgcaagtccggtttgttgagtttctttttcactgcttcaacaatggcgttggagtaatcctgcgagtaacccaccactttttgctgattgtcgtaataagagaaaggtactgaagattcacgatgaccgacgacaatcacaccgtttttggcgattttgtccagcgtactgcccgctaccggggcggcgtcatctgcctgtgccagtcctgcggaaagcgccagggcgaggattgctgtggcaggtttacgtaattgcatatccaactcctttatcttctgcgttaagaacgcatggatacccgttgtgagtgtttgtgttgttatcgtctgcaactttattgtgcagtgttgtgcctgttaggtaacatttagtttggctaaatgtaaagatattgctgttttattgtttgtttttgcgagatgcgccgcaccattccgaagcaaaattcttaaaccgcacctttttggtgctaccgctgatttgtggtggtgcaacctggttgcgtcgcggctgatttcatcgcttacacagtaaataaagcaacttacatgccaaaaaatacttaggggcgaattaattacgattgtaattttaggctgaaaaagtcatatttcggacagaattatcttttcggcatgggacgtttgccgggatgataactgcacacgggaaaaatgctttttacctgtcttttcaaggaagaaacaccttatgtctgcatcttcggttaagccgttaaatgttcaattacccgcaataacccttatcctttttgcactctgtattgggatattttgttatctcgcacaatggatgagttatgaagaggtcgatcaatccgcacttatccatctcggtgcaaacgttgcgcctcttactttgtcgggtgaaccctggcgcttattgagcagtatctttctgcacagtagtgtttctcaactgctgatgaatatgtttgcattcctggtcgtgggaggcgtggcggaacagattctggggaaatggcgactcctgattacctggttattctccggcgtctttggtgggctcatcagcgcctgttatgcgttacgcgaaagtgagcagatagtcatcagcgttggggcatccggggcgattctgggaatagctggtgcagcgatagcaacacagtttgcttcaggtgcgggcacataccataaaaaccagcggcgagtattttctctgttgggtatggtggcgctgacactgttgtatggtgcccggcaaacaggaatagataatgcttgtcacattggcggcctgattgcgggtggcgcgttgggttggctgagcgcgcgtttatctgggcaaaaccgactcgttacggaaggcgggattattgttgcgggcagtcttcttctgaccggggctatctggcttgcgcagcagcagatggatgagtcagttttacaagtcaggcaaagcctgcgtgaagcgttttatccacaggagattgaacaagagcgacggcaaaaaaagcagcagttagcggaggaacgcaacgccctcagggaaacattatccgctccggtaagtcgtgaacaggccagtggtgatttgctcgctgagattgccgatatccatgatatggcgatcagtcgggatggtaatacgttgtatgccgcaattgaaaacaccaacagcattgttgttttcgacctcggacaaaagaaaatcctgcatacctttacagcgcccatagcgaaagaaaagtcagtcaaacattgtggtggctgtaaagatcagggcgtagatcgctggcattaagcccggatgaaaagttgatttatgcgacgtcatttgaagcgaatgcgttatcggtcattaacgtggcgacaggggagattattcagtcgattaccaccggtgcacatcctgacagttttatcctctcgcgtgatggcacaaaagcctgggtgatgaatcgcaccagtaatagtgtgtcagcgattgatctggtgacttatcagcatgtggcggatatcccgctggagaaatacgacgggacggggacgagcggtaaaccaggcgcctgggttatggcactttccccggatgaaagaacattactggttccgggagcaggcagaggtaacatcgtgcggatcaataccatcacgcatcagaaagaagactttcccgcaggtgatgcgcgtggaacgatatcggcgatgcgttttcgacctgaaaacggcgaggttatttttgccgatagtcaggggatttcacgtataagcgtaggggatcaacaagccagcattatgacgcaatggtgtagcaggagcgtttattccgttgagggtattagcccggacggtcaatatttagcgttggtgtcatatggcctgcaaggttatgtcatcctgctcaatattaatgccgggcagattattggcgtttatcctgccagctacgttaatcaccttcgtttttcagcggatggtagaaaaatatttgtcatggcgaagaacgggttgatccaaatggacaggacgcgctcgcttgatccgcaggcaattattcgtcatccccaatatggcaatgtggcttgtatccctgaaccgtaagaaaaaggggcatgataaccatgccccaaagctcaatgagaaagtacgttttgctcatgcaggatacatcaggcacatcaacgtttacatgctcgcagactcatcagcacagcggcaaaaccaaacagcgccgtcagcacccacagcggccagttgccggtacgtgcatacggtgtgagtccggtggtcggtgtcacattagtggtcaacacctcgcgggtgaactgcgggatcatcgcctgaatctcaccctgcgggccaatcaccgccgtaatgccgttgttggtgctgcgcaacagtgggcgcgccagctccagcgcacgcattcgcgccatctggaagtgctgccatggaccaatagacttaccaaaccacgcatcgttggagatagtcagcagatagtcggtatccgggcggaagttatcgcgcacttgctcgccaagaatgatctcgtagcaaatggccgcagtaagctcaataccatttaccgacagcggcggctggatatatggcccacggctgaacgacgacatcggcagatcaaagaacggtgctaacggacgcagaatcgactccagcgggacaaactcgccaaacggcaccagatggtttttgttatagcgatcggctgattcgtagctgtacggtgcacctttacccagcgtgatgatggtgttgtaggtatcgtagcggttctgcttattgagacgcgcgtcgacaatcccggttaccagcgagctacctttatcacgcaactcaccgtccagtgctttgaggaacggttgctgattaatttccagatcggttatcgccgactccggccagataatcaacgatgatttgcccagcagcggtgccgttgcgttgtagtaaatcttcagcgtattaagaagctggtctccgtcccatttcagtgattgcggaatatcgccctgaaccatcgaaacctgaatggttttctccggttgcggggtaaaccattggatgtaacgcagcgggaagggaagggcaaacagcacgacggccaccaccagcggacgccagttgcgtttgactaacgccagtgccagcaggccgctaaccatcatcagcaggaagttaatggcttccacgcccattattggtgccagcccttttaacgggccatcaatctggctatagccgaactgtaaccacgggaagccagtcagcacccaaccgcgcagaaactcggtcacttgccagagagcaggggcggcaatcgccacgcgcagccaggtggttttcggccacaggcgcgacagcacgccagcaaacagtccggtatacagcgacaaatacgccgccagcagcaccaccaggaagatgttaaccgggccaggcatcccgccaaaggtcgcgatgctgacatagacccagttaataccggtgccaaagaggccaaatccccagcagaagccaatagcggcagactggagcgggcggcggttaaaggtcagcgcctgaagccccatcagcgaaacaatcgccgcaggccagacatcgtaaggagagaaggccagcgttccgcaggcaccgaataataacgccagcagcaggcgaatgcgctggcgttcaattaatgaggcaaaagccatgtagttatctatccagtttcggttttattcatccagctttggctggggtgagtcatccgggattttgacatgaacctgaataatacgccgactatcggccatcgccactttgaactggtaaccgtcgatgtcgatagtttcgccacgcgccggaagatgcccaaacgcctgcatcaccagaccaccgatagtgtcgacttcttcatcgctaaagtgggtgccgaacgcttcgttgaagtcttcaatggaagccagtgcgcgcacggtccaggtatgacgactcagctgacggaagtcgatatcatcttcttcgtcatactcgtcttcaatctcaccaacaatcagttccaggatgtcttcaatggtcaccagaccggaaaccccaccgaattcgtcaataacgatcgccatgtggtaacgctgagagcgaaactctttcagcatccggtctacgcgcttactttcaggaacgacaaccgcctgacgtaacactttgtccatgctgaaggcttcagcatcgctgcgcataaacggcagcaagtctttcgccatcagaatcccttcaatgtgatctttgtcttcgctaatcaccgggaaacgtgagtgggcggactcgatgatgacatcaaggcattcgtccagcgtctggttgcgtttcagggtaatcatctgggagcgggggatcatgatgtcgcgaacgcgttggtctgcgatgtccatcaccccttcgagcatatcgcgcgtatcttcgtcgataaggtcgttctgcccggaatcacggatcagcgccagcagttcgtcacggtttttcggttcaccgtggaaaagttggctgagtaacagggagaaaaatcccttcttgttgcttatcgtgtcactactgtgtgaattgtcgtcgctcatggcgtcgtatgggttctcatgttagttaatcaaaacgcgtcgttaatcaccaacgacggggacgtctgccagtcaaatgcctggcaaattattctttctcggcaatgtacggatcctcatagcccagagcaagcataatctctgtttcgagggcttccatttcttctgcttcgtcatcttcgatgtgatcgtaacctaacaaatgcagactgccgtgcaccaccatatgcgcccagtgcgcctccagtggtttgccttgctcctgagcttccttctcaaccacctgacggcagataaccagatcgcccagtagcgacatttccatgccaggcggcacttcaaacgggaaggagagcacgttggtcggcttatccttaccgcgataggtcagattcagactgtggctttcggcggtatcgaccacgcgaatagtcacttccgattcttcctgaaactgcgggatcaccgcattcagccatgtttgaaactggctctcttccggtaacccggaattatcttcacatgccagttgtaaatcgaggatcacctgactcatttttgttcctgttcttcgcgcttgcgttctgccgccagcgccgcttttcgtttttgttcggcttcttcccaggcttcataggcgttaacgatacgcgccaccaccgggtgacgaaccacgtcttcgctgtggaagaagttaaagctgatctcttcgacatcggccagcacttcgatggcgtgacgtaagcctgatttagtattacgcggcaggtcgatctgtgtgacgtcgccggtgataaccgcttttgagttaaaaccgatacgggtcaggaacatcttcatctgttcgatggtggtgttctggctctcatcgagaatgataaacgcgtcgttcagcgtacgaccacgcatataggccagcggcgcgacttcaataacgttgcgctcaatcagtttctcaactttctcaaagcccagcatttcaaacagcgcgtcgtacagcgggcgcagatacgggtctactttctggcttaaatcgccaggcaggaagcccagtttctcaccggcttcgaccgccggacgagtcagcagaatacggcgaatctcctgacgctccagggcatcaactgccgcagccactgccaggtaggttttacccgtacccgccgggccaacgccgaaggtaatgtcatggtcgagaatattggcgatgtactgcgcctggtttggcgtgcgcggcttaattacgccgcgtttggttttgatattgaccgctttgccgtactccggcacgctctccgcactttgctccagtactcgcgcttctttaatcgcaaggtggatctgttccggttcgatatcctgaatctgaccgcgcatcggggctgtatcgacatacaggctacgcagaatgtctgccgcagcggtgacgcaaatcggacggccggtcagtttaaagtggttatcgcggcgattgatctcgatgccgagacggcgttcgagctgcttgatgttgtcatcaaacgggccgcacaggctcaacagacgcgcattgtctgctggctccagggtgatttcgcgagtgtctatgttcaaaccgttcctcttatctgtatgccgccggaagctgaacattcaccggcctataaggaaattattcacgccacaggaaaaaggcgcaagcattgcgataaagatggggataaagagagaaaaaacaaggcccaccggaacggcgggcctgagaattacggttgataataacccacgccaaggtcgttttctttgcgagtacgggcaatcactgattccggtgtttctgccacgcgcagacccatttcatcttcagtacgcaccactttaccgcgcagagagttcgggtagacgtcggtaatttctacatcgacgaatttaccgatcatatccggcgtaccttcgaagttgaccacgcggttattttcggtacgcccggaaagctccatgatgctcttacgcgatgtaccttctaccagaatacgctgggtggtgccgagcatccggcggctccacgccatcgcttgctgattgatacgttcttgcagaatatacagacgctgcttcttctcttcttccggaacatcatccaccatatcggcggctggtgtacccggacgtgcagagaagataaagctgtagctcatgtcgaaattgacgtcggcaatcagcttcatcgttttctcgaagtcttcggtggtttcgccagggaagccgacgatgaagtcagaactgatctgaatatccgggcgcgccgcacgcagtttacggatgatcgctttgtactccagcgccgtatgggtacggcccatcaggttcagaatgcgatcggaaccactctgtaccggcaggtgcaggaagctcaccagctccggcgtgtcgcggtacacttcgatgatatcgtcggtgaattcgatcggatggctggtggtaaagcgaatacgatcgatcccgtcgatcgcagcaaccagacgcaacagatcggcaaacgatccggtggtgccgtcgtagttttcaccacgccaggcgttcacgttctgaccgagcaggttgacttcacgcacgccctgagccgcaagctgggcaatctcaaacagaatatcgtcggacggacggcttacctcttcaccacgggtgtaaggcaccacgcagtaggtgcaatatttattgcagccttccatgatggagacaaacgcggtcggcccttcggcgcgcggttccggtagacggtcaaacttctcgatttccgggaagctgatatctacaaccgggctgcggtcgccacgcacggagttgatcatctccggcagacggtgcagcgtttgcggcccaaaaataatatcgacatagtgggcgcgctggcgaatgtgctcgccttcttgcgatgccacgcagccaccgacgccgataatcaggtctggattcttctcttttaacagtttccagcgacccaactgatggaagactttttcctgagccttctcgcggattgagcaggtgttcagcagcagcacatccgcttcttccgccacgtcggtcagttgatagccgtgggtggcatccagcagatcggccatcttcgatgaatcgtactcgttcatctgacagccccaggttttaatatggagttttttggtcatcgacttgctcttgcgaaatagtagccaggaatgcagggcgcatagtgtaatgctttgctgtcgttgtgaccagtatgagcgttatcagcccttgggggtaaaaatcctgtaaacttaaagcatattgctaacaggatgattgaccatgacaaatcaaccaacggaaattgccattgtcggcggaggaatggtcggcggcgcactggcgctggggctggcacagcacggattttcggtaacggtgatcgagcacgcagaacctgcaccgtttgtcgctgatagccaaccggacgtgcggatctcggcgatcagcgccgcatcggtatcattgcttaaagggttaggggtctgggatgcagtacaggctatgcgttgccatccttaccgcagactggaaacgtgggagtgggaaacggcgcatgtgatgtttgacgccgctgaacttaagctgccgctgcttggctatatggtggaaaacaccgtcctgcaacaggcattgtggcaggcgctggaagctcatccgaaagtaacgttacgtgtgccaggctcgctgattgcattacatcgagataatgatcttcaggagctggaactgaagggcggtgaagtgattcgcgcgaagctggtgattggtgctgacggcgcaaattcgcaggtgcggcagatggcgggaattggcgttcatgcctggcagtatgcgcagtcgtgtatgttgattagcgtacagtgtgagaacgatcccggcgacagcacctggcagcaatttaccccggacggaccgcgtgcgtttctgccgttgtttgataactgggcatcgctggtgtggtatgactctccggtacgtattcgccagttgcagaatatgaatatggcgcaactccaggcggaaatcgcgaagcatttcccgtcgcgtctgggttacgttacaccgcttgccgctggtgcgtttccgctgacgcgccgacatgcgttgcagtatgtgcagccggggcttgcgctggtgggcgatgccgcgcataccatccatccgctggcggggcagggggtgaatcttggttatcgtgatgtcgatgccctgattgatgttctggtgaatgcccgcagctacggtgaagcgtgggccagttatcctgtcctcaagcgttaccagatgcggcgcatggcggataacttcattatgcaaagtggtatggatctgttttatgccggattcagtaataatctgccgccgctgcgttttgtgcgtaatctcgggttaatggcggcagagcgtgctggcgtgttgaaacgtcaggcgctgaaatatgcgttagggttgtagccttacaacattgccggatgcgtgccaaccgtaggtcggataagacgcggcagcgtcgcatccgacattgaaggataagacgtgtcaacatcgcattcgacattgaatgaacgcagaaaagcaaaaagctcgccgaagcgagcttttttaatgtggctggggtacgaggattcgaacctcggaatgccggaatcagaatccggtgccttaccgcttggcgataccccaactgggcgcacttacgatgtaagcgtcttgaataaattggctggggtacgaggattcgaacctcggaatgccggaatcagaatccggtgccttaccgcttggcgataccccaacaaattggttttcgaatttgccgaacgtattcgacacattcagaatttggtggctacgacgggattcgaacctgtgaccccatcattatgagtgatgtgctctaaccaactgagctacgtagccagattgtttcttcgatggctggggtacctggattcgaaccagggaatgccggtatcaaaaaccggtgccttaccgcttggcgataccccaataaccgggcggtgaaccgcttactcgaagaagatggctggggtacctggattcgaaccagggaatgccggtatcaaaaaccggtgccttaccgcttggcgataccccatccgtacaacgctttctggtgaatggtgcgggaggcgagacttgaactcgcacaccttgcggcgccagaacctaaatctggtgcgtctaccaatttcgccactcccgcaaaaaagatggtggctacgacgggattcgaacctgtgaccccatcattatgagtgatgtgctctaaccaactgagctacgtagccatctttttttcgcgataccttatcggcgttgcggggcgcattatgcgtatagagccttgcagcgtcaacctctttttcaaggaaaattgctcgaaagtgactgtttggttaggttgcgaacagcgtggcgctatattcgtcaattattgtttactttgtgttttttccccaccctacagccattcttttgtcgtacaggatgaaattcggaattcaacaatagtggtgggaaattaatctatgaaatactggcctacagtgatgagttgtcaaacagtgatgtggcaaacccggaacatttccttactgcatatcagaattaacaagcacctcaataactgaaacagccccggatttcaccggggctgtttcgcatttcttacttatacgccgactggtgaacgccaaccgcacgaccagacggatcgtccattttcttgaacgcctcatcccactcaatcgctttagcggaagaacacgcgacggaaggaccgccaggcacgcactcagcggcgctcggaagcgggaacagttcttcaaagatctcccggtacagatacgcttcttttgaggttggcgtgttgtacgggaagcggaagcgggcagtttccagttgctgatcagaaacctgctgcgccgccacttctttcagggtgtcgatccaactgtaaccgacgccatcggagaactgctctttctgccgccaggccacgcttgcgggcaggtatgactcaaaacattcacgcaggatgtgtttttccattttgccgttaccgcacattttatcctgcgggttaatgcgcatcgccacatcaaggaattttttgtcgaggaacggaacgcgtgcttccacgccccaggctgacatcgctttgttggcgcgcgcgcagtcatacatatgcagggccagcagtttacgcaccgtctcttcatgcagttctttggcattcggtgctttgtggaagtaaagataaccgccaaacacttcatcagaaccttcaccggacagcaccattttaatgcccattgccttgatcttacgcgacattaaatacatcggtgttgaagcgcgaatagttgtcacatcataggtttcgatgtggtaaatcacgtcgcggatggcatccagaccttcctgtacagtgaagtgaatttcgtgatgcaccgtgcccagatggtttgccacttcctgggctgctttcagatccggtgaacccggcagacctacagcaaaggagtgtaattgcggccaccaggcttcagagcgttcctgatcttccacgcgacgggcggcgtatttcttggtgatcgcggaaataattgaggaatccagaccacccgagagcagcacaccgtaaggaacgtcagacatcagatggcttttaacggaatcttccagtgcctgacgcagctcgtttttgtcggtcacgttatctttcactgcatcaaagtcgaaccagtcgcgatgataataagaacggatttcgccgtcctgactccacaaatagctccccgccgggaactctttaatcgtgcggcaaactggcaccagggctttcatttctgaggccacatacagctgaccgtgctcgtcatagcccatatacagtgggatgatccccagatggtcgcgaccaatcagatatgcatctttttcgctgtcgtacagggcaaaggcaaacatgccctgcaagtcgtcgagaaattccggccctttttcctgatacagcgcgaggatcacttcgcagtcagatccggtctggaactgataacgatcgccatattcggcgcgcagtgcctggtggttgtagatttcaccgtttaccgccagcacatgagttttttgttggttgtagagaggttgcgcccccgcgttaacgtcaacaattgacagacgttcgtgggcgagaatggcgttatcgctggcataaataccggaccagtccgggccacgatgacgcatcaggcgtgacagctcgagtgctttcttacgcagctcaactgcgtctgttttgatatcgaatacgccaaaaattgaacacataaccttctccgttaacctggtatttgttgcttgttgtgtttgcttgtttaaaaaaatgccgcaaagcagcactgtgcgcaagcgatttggcagtgcaaaaataaaaaacgtaatggtgattgctgatttgtgaaaaaggggatggtgtggtgatgtatttattgatggatcgataatttttggcgagttttattgaatgggatgattttaatgatgggtaaaaataagaaaccacgccctgagacgtggttgctattcagataacgtcgatttcagcgaccgacgggtaaatccagcttgggcggaacggcatactgtcgatatcgtcgagcgatgaaacaccagaaagcaccagaatcgtctccagacccgcctggaagcccgccagaatatcggtacgcaagttatcgccgacaatcaccgtttcttccgaatgcgcctgcattttgtttaatgccgcgcggatgatccacgggctgggcttaccaacatagaacggtttgcgcccggagattttctcaatccctgcacacaacgcgccacaagcgggataaaaaccgcgcccgtgggtgtccgggttggtggcgataaagcgtgcaccgttagcgacgaaataggccgctttatgcatcatgtcccagttgtaggaacgcgtttcgccaacaatcacaaaatcagggttcacatcggtaatagtgaaaccggctttgtacagttcatgaatcagtgcgccttcgcccaccacatacgctttcttgccttcctggcgacgcaggaaatcggcagtcgccatcgcagaggtataaaacacgctatccggcacatcgacaccggcagtggcaaagcggttcgccagatcttgcccggtctgcgaaggatagttggtcagcaacaccagcggcaggcctttatccataatcccgtgcaaaaattccgctgcacccggtacggcgacgttatcgtgcatcagcacgccgtcgatatcgcaaattacatttttaatggtcatggactacccagaatattgacaacaataagcgccactataaaagcacattaattttccagcaaatgctggagcaaaataccgttgagcatggcgcgttttaccagcgcaaaagcgccgattgccgagcggtgatccagctcagaacgtaccaccggcagattagtgcgaaacgccttcagcgcctgggtattaatgcagctttcaatagcagggagcagcactttatcggcttcggtgatttcaccggcaataacaattttttgcggattaaataagttgatagcaatggcgatggttttgcccagatgacgaccgacatactcaatcacttccgaggccaggctatcgcctttgttcgcggctttgcagatagttttgatggtgcagtcgtccagcggcacgcggctctggtagccctgctttaacagattcaacacccgttgttcaatagcggcgttggcagcgatagtttccaggcagccaaagttgccgcagtggcagcgttcacccagcggttcgacctgaatatggccaatttcaccgacgttgccgttgcggccaataaaaatgcgcccgttagagataatcccggccccggttccgcgatggacacgcaccagaatggagtcttcgcaatcctgacttgcaccgaagtagtgctccgccagcgccagactacggatatcgtgaccaacgaaacaggtcactttaaaacgttcttccagtgcttctaccagcccccagttttctacctgaatatgcggcatgtaatgaattttgccgctgtccgggtcaacaagccctggcaggatcaccgaaatcgcgatcagctcgcgcagtttgcgctggtagctatcaataaactgagcaatggcattcaacagggcatgttccagcgtttgctgggtacgttccggcagcgggtaatgttcttctgccagcactttgctgctgagatcaaacagggtgatggtggcgtcgtgacgaccaagccgtacgccgattgcgtggaaattgcgggtttcggtgacgatggagatagcgcggcggcccccggtggaggcctgctgatcaacttctttgatcagcccgcgttcgataagctgacgcgtaattttggttacgctggcggggcaagctggctttgctcggcaatctgaatccgcgagattggcccgtactggtcaatcaggcgataaaccgccgcgctgttaagctgttttacgagatcaacattacctatctgagcttgtccgcctggtgtcatactttctcttattgagttacgacctcgttaccgttaacgatggtcttggtgattttaaaatcaggtgtgaatgcggtcaggttggctactttacctgcggcgagtgtgccgagacgtttctcaacgccaatcgcacgcgccggatagagcgtcgccatacgcagcacttcatccagtgcgataccgcaatgttcgaccagattacgcacgccttcaatcatggttaaggatgaaccgcttaacgtaccgttctcatccacacaaagtccgttacggtagtatattgttttacccgcaaaaatgaactgttcaatgttggcacctgctggcgcggtggcgtcggtaaccagacacagtttgtcgcctttcagacgtttagcgttacgaatgttggcgtaatcaacatgcaggccatcagcaataataccgcaataaatgtcagcttcgtcgaggatcgcgcccgccaggcccggttcacgaccggtaatatacggcatcgcgttgtacagatgggtggcaaaggtaatccccgcgcggaaaccggcttttgcttctttcaacgtcgcgttggagtgaccggcagaaaccacaatcccggcatttgccagtttgctgatgacttccgcaggaaccatttccggtgccagggtcactttggtaatgacgtcggcgttttcacacaggaaatcgaccagcgcggcatcaggcttacgcacaaaattcggattatgggtgcctttttttaccagattcagccacggaccttccagatgcagacctaacgcctgattcggatgttttgccaggtactcgcgcataacgcctacgccctgtttcatcagctcatcgctggtggtgataagcgtcggcagatagttagtacagcctgatttctcattggctttctgcatgatttccagcgtttccacgctgaccgcttcagcggtgtcgttaaactgtacgccgccgcagccgtttaactgcacatcgataaaaccgggggagagaatggccccgttcagtgaacgttgttcgatctctggcggcagttccgctaccggacagacgcttttaatcaggccatcagcgataacaaccgcgtggtcatcaagaaattcgtggccggtaaagatccggccctgggttaatgcatacattctgacccccgattttaaaaaatattgccctgagcaaggagccagggcagggataacaattacagacctttgatattttctgcttctaattcattgaaatatcttaaagtcttaactttcagctccatggtggaaggttcatcgcacaccatgatcgcttttggatgcagttgcagacagctgatggtccacatgtggttcacgcaaccttcaactgcagcctgcagtgccagtgctttctggctacccagcaccagaatcatcacttcttcggcatccagcaatgtaccaacaccgacagtcagggcatattttggcacctgattgacatcgttatcaaagaaacgagagttcgcgacgcgagtgtcatgagtcaaggttttgatacgagtacgagaagccagagaagacgccggttcgttaaatgcaatatgaccgtcgttacctacaccgcccataaacagatgaatttttccgtaagaacggattttttcttcatactggcggcattcggcgtcgatatccggggcgttgccgttgagaaggttgatgttttctgctggaatatcaacgtgatcgaagaaattacggtgcataaagctgtagtagctttccggatgctctttcggcagaccgacatattcgtccatgttgaaggtgacaacgtgcttaaagctgacctggcctgctttatgcatttcgactaacgctttataggtggtcatcggcgtgccgccagtcggcaggcccagaacaaacggacgatcggcagtcggtttgaacgcattgatacgattgacgatatggcgagcagcccatttgccgacctgttcagcggtagtcagggggatcagtctcattattcacctcaataagtaaaatgtaagccgttggcggattaggcatctttaagcgtaacctggatttgcgcagacaggcgtcaatccgacctgattttttgaatgataaaataagttttctggtttagccagtaaaagggagtgatgataacgatatttggtgacaaaactcacaaaagacacgcgtttaatttgcgatacgaattaaattttcacacactctgtagcagatgatctaacaatctgattacagaacatcggcagtacaatttgcagcaaaataaaaatacggctttaaacgagccaaatagggttctcgtagggggaataagatgaatattttaggttttttccagcgactcggtagggcgttacagctccctatcgcggtgctgccggtggcggcactgttgctgcgattcggtcagccagatttacttaacgttgcgtttattgcccaggcgggcggtgcgatttttgataacctcgcattaatcttcgccatcggtgtggcatccagctggtcgaaagacagcgcaggtgcggcggcgctggcgggtgcggtaggttactttgtgttaaccaaagcgatggtgaccatcaacccagaaataaacatgggtgtactggcgggtatcattaccggtctggttggtggcgcagcctataaccgttggtccgatattaaactgccggacttcctgagcttcttcggcggcaaacgctttgtgccgattgccaccggcttcttctgcctggtgctggcggccatttttggttacgtctggccgccggtacagcacgctatccatgcaggaggcgagtggatcgtttctgcgggcgcgctgggttccggtatctttggtttcatcaaccgtctgctgatcccaaccggtctgcatcaggtgctgaacaccatcgcctggttccagattggtgaattcaccaacgcggcgggtacggttttccacggtgatatcaaccgcttctatgccggtgacggcaccgcggggatgttcatgtccggcttcttcccgattatgatgttcggtctgccgggtgcggcgctggcgatgtacttcgcagcaccgaaagagcgtcgtccgatggttggcgggatgctgctttctgttgctgttactgcgttcctgaccggtgtgactgagccgctggaattcctgttcatgttccttgcaccgctgctgtacctcctgcacgcactgctgaccggtatcagcctgtttgtggcaacactgctgggtatccatgctggcttctctttctctgcgggggctatcgactacgcgttgatgtataacctgccggccgccagccagaacgtctggatgctgctggttatgggtgttgtcttcttcgctatctacttcgtggtgttcagtttggttatccgcatgttcaacctgaaaacgccgggtcgtgaagataaagaagacgagatcgttactgaagaagccaacagcaacactgaagaaggcctcaatcaactggcgaccaactatattgctgcggttggcggcactgacaacctgaaagcaattgacgcctgtatcacccgtctgcgcctgaccgtggctgactctgcccgcgtcaacgatacgatgtgtaaacgtctgggtgcttctggtgtagtgaaactgaacaaacagactattcaggtgattgttggcgcgaaagcagaatccatcggcgatgcgatgaagaaagtcgttgcccgtggtccggtagccgctgcgtcagctgaagcaactccggcaactgccgcgcctgtagcaaaaccgcaggctgtaccaaacgcggtatctatcgcggagctggtatcgccgattaccggtgatgtcgtggcactggatcaggttcctgacgaagcattcgccagcaaagcggtgggtgacggtgtggcggtgaaaccgacagataaaatcgtcgtatcaccagccgcagggacaatcgtgaaaatcttcaacaccaaccacgcgttctgcctggaaaccgaaaaaggcgcggagatcgtcgtccatatgggtatcgacaccgtagcgctggaaggtaaaggctttaaacgtctggtggaagagggtgcgcaggtaagcgcagggcaaccgattctggaaatggatctggattacctgaacgctaacgcccgctcgatgattagcccggtggtttgcagcaatatcgacgatttcagtggcttgatcattaaagctcagggccatgttgtggcgggtcaaacaccgctgtatgaaatcaaaaagtaatctgctttatgcctgatgcgacgcttgagcgtcgcatccaacaatgacaagcggtggagatcttctctgccgcttttttttcatcaatcatccccataatccttgttagattatcaattttaaaaaactaacagttgtcagcctgtcccgcttataagatcatacgccgttatacgttgtttacgctttgaggaatccacgatgagtgaggcagaagcccgcccgactaactttatccgtcagatcatcgatgaagatctggccagtggtaagcacaccacagtacacacccgtttcccgccggagccgaatggctatctgcatattggccatgcgaaatctatctgcctgaacttcgggatcgcccaggactataaaggccagtgcaacctgcgtttcgacgacactaacccggtaaaagaagatatcgagtatgttgagtcgatcaaaaacgacgtagagtggttaggttttcactggtctggtaacgtccgttactcctccgattattttgatcagctccacgcctatgcgatcgaactgatcaataaaggcctggcgtacgttgatgaactgacgccggaacagatccgcgaataccgcggcaccctgacgcaaccgggtaaaaacagcccgtaccgcgaccgcagcgttgaagagaacctggcgctgttcgaaaaaatgcgtgccggtggttttgaagaaggtaaagcctgcctgcgtgcgaaaatcgacatggcttcaccgtttatcgtgatgcgcgatccggtgctgtaccgtattaaatttgctgaacaccaccagactggcaacaagtggtgcatctacccgatgtacgacttcacccactgcatcagcgatgccctggaaggtattacgcactctctgtgtacgcttgagttccaggacaaccgtcgcctgtacgactgggtgctggacaacatcaccattcctgttcacccgcgccagtacgaattctcgcgcctgaatctggaatacactgtgatgtccaagcgtaagctgaacctgctggtgaccgacaagcacgttgaaggctgggatgacccgcgtatgccgaccatttctggtctgcgtcgtcgtggttacactgcggcttctattcgtgagttctgcaaacgcattggcgtgaccaagcaggacaacaccattgagatggcgtcgctggaatcctgcatccgtgaagatctcaacgaaaatgcgccgcgcgcaatggcggttatcgatccggtgaaactggttatcgaaaactatcagggcgaaggcgaaatggtcaccatgccgaaccatccgaacaaaccggaaatggggagccgtcaggtgccgtttagcggtgagatttggatcgatcgcgccgatttccgcgaagaagctaacaagcagtacaaacgtctggtgctgggtaaagaagtgcgtctgcgtaatgcttacgtcattaaggctgaacgcgtggagaaagatgccgaaggcaatatcaccaccatcttctgtacttatgacgccgacaccttaagcaaagatccggcagatggtcgtaaagtcaaaggtgttattcactgggtgagcgcggcacatgcgctgccggttgaaatccgtctgtacgaccgtctgttcagcgtgccgaaccctggtgctgcggatgatttcctgtcggtgattaacccggaatcgctggtgatcaaacagggctttgctgaaccgtcgctgaaagatgcggttgcgggtaaagcattccagtttgagcgtgaaggttacttctgcctcgacagccgccattccacagcggaaaaaccggtatttaaccgcaccgttgggctgcgtgatacctgggcgaaagtaggcgagtaattttaagttctaccaggccgggtgaggcatttacgtcgcatccggcaagaaatagcaaacaatcccaaacgccgcactctgcggcgttttttctgcttttcttcgcgaattaattccgcttcgcaatttatccataaaataaatttaaaatcacaaaccataattaaataaaatgtaaccgctttcatcttgctggaaattcacgcttttattcttctgcaagcctttcaaccgcaaacttaagccttgtaacaaaaatcatcaaaatatgtgcggttgctcatgttcttacattctggttacagaaagagattgataattcgcgtcgcgaaaaatagtctgttcctgtagtcagcgagacttttctcaacgctacttttttaatttttattttttcgctgttcacctttggtgcagcaatttatacgtcaaagaggattaacccatgcgtacgtttagtggcaaacgtagtacgctggcgctggctatcgccggtgttacagcaatgtcgggctttatggcaatgccggaggctcgcgccgaaggattcatcgacgattcaaccttaaccggcggtatatattactggcagcgtgaacgcgaccgtaaagatgttaccgacggcgacaaatacaaaaccaacctttctcactccacctggaatgccaacctcgattttcagtccggttatgctgctgatatgttcggccttgatattgctgcgtttacggcgattgaaatggcggaaaacggcgacagctcccacccgaacgaaatcgcgttttcaaaaagtaataaagcctatgacgaagactggtccggcgacaaaagcggtataagcctgtataaagctgcggccaaatttaaatacggtccggtttgggcgagggcaggttacattcagccaactggtcaaacgctgttagcgccgcactggagctttatgccaggtacttatcagggggcggaagccggggcgaattttgattacggcgatgctggtgcgttgagtttctcctacatgtggaccaacgaatacaaagcgccgtggcatctggaaatggatgagttttatcagaacgataaaaccaccaaagttgattatctgcactcccttggggcgaaatacgacttcaaaaataacttcgtactggaagcggcatttggtcaggcggaagggtatatcgatcaatattttgccaaagccagctacaaatttgatatcgccggtagcccgttaaccaccagctaccagttctacggtacccgcgataaagttgacgatcgcagcgtcaacgatctttatgacggcaccgcttggctgcaagcattgacctttggttaccgggcggctgacgtagtggatttgcgccttgaaggcacctgggttaaggctgacggtcagcagggatacttcctgcaacgtatgactccaacctacgcttcctcgaacggtcgcctggatatctggtgggataaccgttccgacttcaacgctaacggagaaaaagcggtcttcttcggtgcgatgtatgacctgaaaaactggaatcttccaggcttcgccatcggcgcttcctacgtttacgcatgggatgctaaacctgcgacctggcagagcaatccggatgcgtactacgacaaaaaccggactattgaagagtctgcctacagcctggatgcggtctacaccattcaggacggccgcgccaaaggcacgatgttcaaactgcacttcaccgaatacgacaaccactctgacatcccaagctggggcggcggttacggtaacatcttccaggatgagcgtgacgtgaaatttatggtaatcgcaccattcaccatcttctgatgcccgacgcggcaggttttgtgcctgccgcacgtttgaggaatttgctatgaaaaaactgattctcatcgccatgatggcatcgggctggtagcttgtgcgcaatcaaccgcgccacaggaagacagtcgtctgaaagaggcatacagcgcctgtatcaacaccgcacaaggttcgccagaaaaaattgaagcctgccagagcgtgttaaacgtgctgaagaaagaaaaacaacatcagcagtttgccgaccaggaaagtgtacgcgtactggattatcagcagtgtctgcgcgcaacgcaaaccggtaatgaccaggcggtgaaagccgattgtgataaagtttggcaggaaattcgcagtaataacaaataagtgagagctgtaactctcgcttttcttatttcccttgcataaaaaagccaacccgcaggttggcttttctcgttcaggctggcttatttgccttcgtgcgcgtgctcatcttcgcggcaatcgccttcggcacagtgaccgtaaagatagagactgtggttagtcaggcgaatgccatgttttgcggcaatttcacgctgacgcgcttcgatggaatcatcactaaattcgataaccttgccgcagtcgaggcagatcaggtgatcgtggtgatgttgctgtgtcagttcaaatacggatttaccgccttcaaaattgtggcgggtgacgataccagcgtcgtcaaactggttcagtacgcgatataccgtagccagaccaatttcttcacccatatcgatcagacgtttgtataaatcttccgcactgacgtgatggttgtccggctcctgaagaacttccaggatttttaaacgaggaagcgttactttcaggccagctttctttagggcggtattgttatcagtcatgcggaatctgtcctgttactaagcggttcacttcattagaagaagtgacagaatttgctcttgagataatgcgtatcattatagaattgccacgcctaaatgaaaaccacaagtccctggcaaatattgttaataaaaacgtggcacagcttacatttacaacggcaaggccacttgaacaccgggacattgtacaggtacaacagcaaaagttacaaatttgtagcaattattttgattggcattatctattaatacggcgtagacatgagtctacgccgcatcacatcaggcattgagaatttcgtcgagatgcaactcttcagaaatctgtttaacccatttttctacacgttcagcggtcagttccggctgacggtcttcgtcgatagccagaccgacaaagtggtcgtcatctgccagaccttttgatgcttcgaaatgatagcccgcagttggccagtgaccaacgatggttgcaccgcgcggttcaatgatgtcgcggatggtgcccaatgcgtcgcagaaatattcggcgtaatcttcctggtcaccacaaccaaacagcgcaaccagtttgccattgaaatcaatctcttcgagagtcgggaagaagtcatcccagtcacactgcgcttcgccgtaataccaggttgggatgcccagcagcagaatgtcataagcttccagatcttctttgctgctttttgcaatgtcatggacatcggcaacgtctttaccaagctgtttttgaatcatttttgcgatattttcggtattaccggtgtcgctgccgaaaaagatgccagtgatagccatgagtgaaataacctcttgaaacttattgaaatgggggtggaaaattgcccacggataaaggcaatcatagcagaacaggcagtcttgcggaatcagcaaacgagcaggactgcacactgtgctacatgaaagtggaaatttaaacgatgccctgactacgcagcgccgccagttgctgcattaacatctcttcgatcagttcgctacggctcatattgcgcgactccgccagctcgttcagcgcctcgacagcttccgcgttcagcttcagttcgacacgcttaaggccacgtactttgtcgcgttttagctggttgcgtttattaatacgcagctgttcatcgcgcgaaagcggattagttttcggtcgtcccggtcgacgctcgtgcgcgaacagatctaatgtcgtacggtccgtttgttctttggccatgatcttggtgacttcgggggaaacaatcagccaggcctctgcccggatggatagcgcgccataatacatcagcgcgatgagtcacgccaacgcccacgcgcggaaagcgacgcggacgctgggtttttaatcagttgcgttaatcattgagatagcgacggatagcgcgtaataccgcatccggtttttcagcatggacccagtgacccgcgcctgcaatcacatgcgcccgtgcctgtggaaattgtgccagtaaatcatcacggtactgctcgctaacatacggagaattgccgccagggataaacagggcagggtgatcccatgccgggattttctcccaacccacaatatgcggatactgatcccacaataccggcacgttaaagcgccactccccgtcaacaaaagatttcaacagaaactgaatcaccccttcttcattaagatgctggcgcattattgctgctgcttgctggcgagtttgtgcgtccgattcactgaccgcgttgatagccgcgaaaatctcatcatgacggcgtacgtgatagtcgaccggtgcgatatcgatcgccaccagtttatcgatgcgatcgggggacagtgcagtaagtgccattaccgctttaccgcccatggagtgaccgataaatgttgctttgtcgatctgcagtgcatccagggtatcaacaagatcctgcgccatcgccgggtaattcattaccggctctctcggtgaaagaccgtggttacgcatatcaacctggatgatattgtgatcgtttaccagatcgcgagccagtacgccaaggttgtcgaggctaccaaacagaccatggacaagaacgatgggagaattattgtgctggttttgtgcagtttgcgcgcggatattcaatttcatggcaaagttctttttttcgcgttgtcgggttagggtattatgttgaccattgtgccacagggctgcaacaaataaggtttattccgagtttttctgcaagccaggcttgacgctatccgctgccgggatttattcatatactcctggcgacttgtattcagctaagacactgcactggattaagatgaaaacgattgaagttgatgatgaactctacagctatattgccagccacactaagcatatcggcgagagcgcatccgacattttacggcgtatgttgaaattttccgccgcatcacagcctgctgctccggtgacgaaagaggttcgcgttgcgtcacctgctatcgtcgaagcgaagccggtcaaaacgattaaagacaaggttcgcgcaatgcgtgaacttctgctttcggacgaatacgcagagcaaaagcgagcggtcaatcgctttatgctgctgttgtctacactatattctcttgacgcccaggcgtttgccgaagcaacggaatcgttgcacggtcgtacacgcgtttactttgcggcagatgaacaaacgctgctgaaaaatggtaatcagaccaagccgaaacatgtgccaggcacgccgtattgggtgatcaccaacaccaacaccggccgtaaatgcagcatgatcgaacacatcatgcagtcgatgcaattcccggcggaattgattgagaaggtttgcggaactatctaaaacgttgcagacaaaggacaaagcaatggcaatccacaatcgtgcaggccaacctgcacaacagagtgatttgattaacgtcgcccaactgacggcgcaatattatgtactgaaaccagaagcagggaatgcggagcacgcggtgaaattcggtacttccggtcaccgtggcagtgcagcgcgccacagctttaacgagccgcacattctggcgatcgctcaggcaattgctgaagaacgtgcgaaaaacggcatcactggcccttgctatgtgggtaaagatactcacgccctgtccgagcctgcgttcatttccgtactggaagtgctggcagcgaacggcgttgatgtcattgtgcaggaaaacaatggcttcactccgacacctgccatttccaatgccatcctggttcacaataaaaaaggtggcccgctggcagacggtatcgtgattacaccgtcccataacccgccggaagatggtggtatcaagtacaacccgccaaatggtggcccggctgataccaacgtcaccaaagtggtggaagacagggccaacgcactgatggccgatggcctgaaaggcgtgaagcgtatctccctcgacgaagcgatggcatccggtcatgtaaaagagcaggatctggtgcagccgtttgtggaaggtctggccgatatcgttgatatggcggcaattcagaaagcgggcctgacgctgggcgttgatccgctgggcggttccggtatcgaatactggaagcgtattggcgagtattacaacctcaacctgaccatcgttaacgatcaggtcgatcaaaccttccgctttatgcaccttgataaagacggcgcgatccgtatggactgctcctccgagtgtgcgatggcgggcctgctggcactgcgtgataagttcgatctggcgtttgctaacgacccggattatgaccgtcacggtatcgtcactccggcaggtttgatgaatccgaaccactacctggcggtggcgatcaactacctgttccagcatcgtccgcagtggggcaaagatgttgctgtcggtaaaacgctggtttcttctgcgatgatcgaccgtgtggtcaatgacttgggccgtaagctggtagaagtcccggtaggtttcaaatggtttgttgatggtctgttcgacggcagcttcggctttggcggcgaagagagcgcaggggcttccttcctgcgtttcgacggcacgccgtggtccaccgacaaagacggcatcattatgtgtctgctggcggcggaaatcaccgctgtcaccggtaagaacccgcaggaacactacaacgaactggcaaaacgctttggtgcgccgagctacaaccgtttgcaggcagccgcgacttccgcacaaaaagcggcgctgtctaagctgtctccggaaatggtgagcgccagcacccttgcaggcgacccgatcaccgcgcgcctgacggcggcaccgggcaatggtgcttctatcggcggtctgaaagtgatgaccgacaacggctggttcgccgcgcgtccgtcaggcacggaagacgcatataagatctactgcgaaagcttcctcggtgaagaacatcgcaagcagattgagaaagaagcggttgagattgttagcgaagttctgaaaaacgcgtaaacacatttaataaaaaaagggcggtcgcaagatcgcccttttttactttgcttttttaaccgtgtttatttttcagttcaaagcgtggtgataccagaccatacagtgtccaaccaaggaaggtcacgatggaaccgtacagcatggcttcttccccggatgagtacagcgcataaaagctatacatcgcgccaacaaaagcaacaaagtttgcaactttcgcttttgaggggggcacattagcgaccttctgaataatgactaatgccgccattgacagaatatacggaatgatattggtcaccacggccaggttaaccagcacgttgaactgactgtttagcgacgggctaatcgtcatcagcgccaacccgctctggataatcacaatggtcaacattccctgcaccggtgcatccactttggttacacgggagaaaattttagggaagtagccttcatcagatgaagatttaaacacctgggcaatggtgaactgccagccaagcagcgaaccgcagcaggacatcaccatcagcgccataatgactttacccacttctggtgtgaacatctgtgcgaaggccaggccaaatggtgccgttgaatttgccagctccatattaggcacaatccctgcaatcacgttggtggagacgatataaatcaccgccgcacctaacgtaccgccgagtaccgcgattggcacattacgttccgggttttccactacatcagtattcgcacacgcagactccagaccgagaaaagcccacagcgtcatagcgatggaagaacctactgcactgaagaacggtgcatgatgcggattccaggaatcaacgtaaagcgtcgggctaaaccagaaccagccgataatgcacaggcctaccaccggaataatgaccccccacacagtaatgctactgatttgcccggtaatgcgcgcaccaccaaagttagccacggtacaaatccacagcactccgatggtcgcaagaccaatctgcactggcgacaaactcgcgccgagcagttcggtgccgtaaccaaccgccgaaatagcaatcgcgacgttagcaatcagcagcgagacaccgtaggtgtagttcgccataaaattgccggacttaccgaaagcatactcggcataaccgcccataccacctgatttacggctgaacataccgcattttgcgaatgcccatgccagtgccattgagcctacggctgtcaccagccaggagataattgaaattgtcccaacttcggcaagctttgtcggcagcatgatgataccggagcccatcatgttgaccatcgtcagtatggttaactgaacgacgcccattttgttcgatttagcctgactcataatttttcccctttcaacagggtactttgcgcatcacgaggcttgatgacatagcaccaaacttgcttacgaccatcatgttcttcgatatagacaccctgaagctccggtgcaaaacctggcaacaggttgatcccttcttccagagcgctgaagtaacgcagaacagcaccaccccagatttcacccggaacaacgcacagcacacccggaggataaggaagcgcaccttcggcagcgatacggccttctgcatccggcagacgaaccagctccacttcaccgcgtaaataggcgtagttggcttcttgcggattcatgcttacgcgtgggaagtgttccttacggaacatctctttttgcagttgtttcacgttgtgacgggcatacaaatcatgcatttcttgacacaactgacgcagggtataaccggcgtagcgctcttcatgctgtttgtagatggaaggcagcacttctgctaatggcgcgtcggactcaagcagtttttcgaagcgtaccagcagggcaacaagttgctgaagcttggccatatcttctgccggagtcagcaggaagaggatggagttaagatcgcatttttccggcactacgccattttcgcgcaggaagttagcaagaatcgtcgcgggtacaccgaacgcttcatattcgccgttacgtgcatcaatacctggggttgtcagcaacagtttgcaaggatcgacaaagtattgattctctgcatagccttcaaaagaatgccagtgttcccctggtacaaactggaagaagcgcagatcaaccgcaatttgcgctgtttcatacgactgccagggtttaccatccaccagttcaggtacgaacggacgaatatgctgacagttatcgaggatcagtttgcgggcattaatgccatttaccacacaatccatccacatattacgaccgctgacaccttcatgcattttggcgttgatatccagtgcggcaaacagcggatagaacgggctggtggaggcgtgcatcataaaggcgttgttcatgcgtttgtgcggtacataacgctgttgccctttgatgtggctgtcttttttatggatttgtgaagtttgagaaaaaccagcctgctgtttatgtacggattgcgtaaccagaatacccggatcgttctcattaagatccagcaacagcggcgaacagtcagccatcatcggaataaactgttcatagccgacccatgcggagtcaaagaggatgtagtcacacagatgaccaattttatccaccacctgacgggcgttataaatcgtaccgtcgtaagtgcctagctgaataacggcgaggcggaaaggacgagcctcttttgcccgctgcggtgcaacttctgtaatcagctcacgcaggtaactttcttcaaaacagtgcgcatcaatgccaccgataaagccatacgggttacgtgcggtttccagataaaccggtgtcgcgccagcctgtagcaacgcaccgtggtggttagatttatggttattgcggtcaaacaacaccagatcgcccggcgtcagcaatgcgtttaagaccactttattagaagatgaagtaccgtttaaaacgaaataggttttatcggcattaaagactttagccgcatgctgttgtgcaatacatggcgcaccttcatgaatcagcagatcgcccattgctacgtcagcattacacaagtcagagcggaagagcatttcgccaaagtattccacgaactgattgcctgccggatggcgacggaaaaactcacccccctgatgaccagggcagtcaaaagcactattgccctgattaacataatcgaccagtgcgcggaagaagggcgggcgcagttgcgtttcataatggctggcagcggtttctaactgacgtccataaaactctttacgtgattcgcaatgttcgaagacaccagaaatacgtggcagatattctgcgggtacacgttcttcattttccgttgcaataaaaacaggaatgtcatagccagtagcgtctatttcatcgagttttccacgttcaacatcactgactgataaaataatggcggcaacgtcaatataattactttcgtctatattcacgcatgcacgatgagtggaaaaacaatccgggcaagaacgactaacggcaatttttaattctgacattttgttcatctctttatttcaggtaatagcaggtcctcaatttctcaaaggagaaatcgatcacgccggaaaaaaagcaaagctccaccgctgataaataaatcagtagtttgctttttgcagatgcaataacccagaccagcccggtaactggctatactcgtcatacctcaagttgcaagtgctgcgactcgaattatttagagtttaaaagggttagcagtatatgagcaccgaggaatacaggtattaacctgtaatgcttaaagtcagggagacctgtacgttggggtgccctttagtcagaagactagcgggcattaaagaaatgaaagtcaaaactattacgatgggcaaacttcatgatatgggttgtccgccttatatgaggcattaagcggttattattttccatttacctttacctcttgctgtgtcagttgaaggtagagttattctatccatgaaatggctataatctgtgaagaagatcaacaaaaaacgatcataccccaaataataaatcattaattatgaatagcgccatattagatgctgttttgttatttaaatgttgtaattttgtgttttatatttgcgttaagaaattaaacctgccaaataataatatttttggcaggtttaataataaattaataattatttaagcgcatttattgaataaacattcatggcataaaccgatacccaataccggtttcagtaatgaaatggcgggggcgagcgggatcctgttccagtttttgtcgcagatgtcccatataaatacgcaaatagtgactgtgttcgaccgcgtttggcccccacacctgattgagtaactggcgctgggtgagcactttcccggcattattcagcagcaccgccagcaggcggaactcaatcggcgtgagatgcacctcttcctcaccccggtgaatcacgcgggcggctaaatcgacggtaacatcggaaaatttcaccagcggatcgggcgcggcggtggcggagtggcggcgtaaagcgacgcgcagacgggcctgcaattcgccaatgccaaacggcttactcagataatcatccgctccggcatccagcgcggcgatcttgtcgctctcttcgctgcgtgcggaaagcacaatcaccggcaccgcgctccactggcgcaggtcgcggataaactcaatcccatcaccatcgggcaggccgagatcgagaataatcaaatctggcttacgggtagccgcttccagcaagccgcgttgcagcgtttcggcctcatagacgcgcatcccgtcgccctccagcgccgtgcgcagaaagcgacgaatagcctgttcatcttcaacaatcagaacgtttgtcacatatcctcatgaaagtcttcaagttcaggagcggtttgctggggaagtgtaacacgaaaacaggcaccaccttccggtcggttgaacgcggtaatagtgcccccgtgtacatccactatcgcccgacaaattgccagtccaagccctacccccggtactgccgactctttattcccgcgagcaaacttatcaaatatcgtctgctcctggcctggcggaagaccggggccgttatcccagacatccagttgtagattttcgccctcaacgtgggcatcgataccaatttcggcctgcgcacccgcatatttcaccgcgttctccagcagattaatcagcacccgttcaaagagtggcccgtcaacgtggattaaggtcagcggttctggcagagaaagattgatgggcgacgataaacccggttccagcatttgcagcgcgctgccgactacttcttccagcgttaaccactctttcttcaaattaaagccgccggactgaattcgcgccatatccagtagattattcaccagtcgggtagtgttcagcacatgctgacgaatctcgctggcctggcgggcgtggggcgatccttcgcttgccagatcgagcgttaagatttctgcctgaccaaacagcaccgtaagcggcgtgcgtaaatcatgcgaaagcgccgccagcagggcgttgcggatctgttcacgttcgcttgccatccgcgcctgttcttcactggcggtcagcgtcagccgctcaaacgcattggcgactaacagcgtaaacgtctctagcaggcgctgctgctccgggatcatcaactgacgcagattccccggttccaccaccaccagtccgtaggttttctcgccgctttttagcggcaaaatctggtacggcacgccgggtaacgtgtcggtgcccgcacccgcaggcaggcctttatcaaaactccactgcgcgatggcatcgtcccatggcgtcattccttgcggatgtgttaacggctgcaatttaccgttgtcatcgggcaacaacacctgactgcgggcatgaaacgtggaggcaataaattgttcgctggtggcggcgatgtcctgcggactgcggcccaccgccagagctttcgacatttcatataagtgccgtgtgcgttgctcgcggtaacgggctacccgcgcctgataacgcacacccgcagtaaggttcccgatcaccagcccgacggttaacatcaccgcgaaggtcagcagatattgcacatcagagacagcgagcgtgccgcgtggggcgataaaaaagagatcgaaactcaccacattaatgacggtagcaaccaccgaaggccagcgtccataaaatagcgccaccaccaccacgccaagcagatacagcatcaccaggttggcggcatcaaacgccatcagccactgcatggcaattaaagtgataacggcgcataacgcggcggcaaccacgcatccctgaatctgtacccgccacttgtctttaaaagagcggctatccggcgcgttgttaatcgtgcgggcgggtggttcatcaagcgcgaccagcacctgatcgagatcgggggcgatgcgcgccagtcggtcagcaaacgtttcccgacgccaccagcggcgcgaggccgggcgaccgagaataatcttgccgagattatgttcacgggcataacgcactactgctttttcttccgctggatcagaaagtgtagccgtctccgcgcccagctcctgcgccagacgtaaggcgctgagaattgcccgacgtttttttccggtaagcgatgcagggcaggggtttcaacatacaccgcgtgccagacgctacccaggcgcgaggccaaccgcgccgccgcgcggaccagtttctcactgccggtgttatgcccgatgcataaaaggatcgcgtcgcgcgtgtgccacactttctcttcaccaggatgcccccgccaggcgcgcatttgctcatctacgcgatcggcagtacggcgcagtgccagttcacgcagggcgatcagattgcctttgcggaaaaaatgttcaatggcgcgctccgcctgcccggcaatatagactttgccttctttcagccgctggcgcagatcgtccgggggcaagtccaccagcactacgtcgtcggcggcatcgaaaaaaggatcgggcacggtttcccgtacctgaattccggtgacgccgctgaccacatcattcaggctttccagatgttgaacgttgacggtagtaaaaacatcaatgcctgcttccagcagctcttcaatatcctgccagcgtttgggatgacgagaaccaggcgcattactgtgcgccagttcgtccattaagatcagcgccggacggcgggcgagggcggcatcgagatcaaactcgctgatatgccgcccacggtacgccaggcgttttggcggcagaacagccagcccttccagcatggcggcggtatctttccgcccgtgggtttctaccacgccaaccacaatatccagcccttgcgcccgcagtcgctgggcttctgccagcatcgcccaggtcttcccgacgcctgcgcaggcaccgaagaaaactttcagcttcccccgatgcggcgcggcagtttgttccagcagacgatcggggtcgggacgtaagggttcgttattcatcaagtttatccagcgccagattgagtttgacaatgttgacgaccggctggccgatatatttcaccagtggttgttggctgtattttgcgatcagttgcgtgagctgttcaacgctgagattacgcgctttcgcgatgcgtgggatctgccaggccgccgcttgcggggtgatattattgtccagcccgcttgccgatgccgtcaccagttcaaccggaatgctcgcgctggcatccgggttagcggcccgtaatgcagcaacgcgtgcggctattagtttatccagctcagggttactgaccgccagattgctcccgccagaagcctgtggattatagggcatttctgccgttgccgacgggcgaccatgaaaatagccgttgccggtaaaattctgcccgattaatgccgaaccccgcactgtatcaccttcacggatcaacgaaccgttggcctgccagggaaaccaccattgccccagcacggtggtcagcagcgggtaaacgccgccagtaatcaataacagaaagataaatgtcgataatgccggacgtaatccacgcatggtaaacctcacaccagaccgcaaacggtcagcagtaaatcaatgactttgataccaataaacggcaccagcagcccacccagaccgtaaatccataagttacggcgcaacatggcagaagcggtaagcggtttataactcacgccttttaacgccagaggaatcaaaaagacgataatcaaggcgttgaaaatgaccgcactgagaatggcggagtcgggcgaatgaaggcgcatgatgttcagcgcatttaactgcggatacgttgccgcgaacgccgccggaataatggcgaagtatttcgccacatcgttggcaatgctgaaggtggtcagcgagccacgggtcatcagcatctgtttgccaatatgtaccacctcgatcaacttggtcgggttagagtcgagatcgaccatattgcccgcttctttcgccgcctgagtaccggagttcatcgccaccgcgacatctgcctgcgccagcgccggagcatcgttggtgccgtcgccggtcatcgccaccaaacggccttccgcctgatactgacgaatcaatgccagcttggcctccggtgtcgcttcggcgagaaaatcatcgacgcccgcttccgcagcaatggcggcggcagtcagacggttatcgccggtaatcatcaccgttttaatgcccatttggcgcagttgcgcgaagcgctctttaataccgcctttgacgatatctttcagcgcaataacgcccagcacacgagaaccttccaccaccaccagcggcgtggctccctgacgcgcaacctgatcgactttttgatcaacatcggtagggaagtgaccaccgttagcctcaatatggcgacgaatggcatcgacagaacctttacggatcatgcggttgtcgatgttgatcccgctcatccggctttgcgcagtaaacggtacaaaggtggcatggagcgactgcacatcgcgctcgcgcaggttaaaacgctgcttggcgaggatcacaatactgcggccttccggcgtttcatcagccagcgaagccagttgtgcggcgtcagccagcgttttttcatccacgccctgcgcagggataaactccgacgcctgacggttaccgagtgtgatggtgccggttttatccagtagcagaacgtcaacgtcacctgccgcttcaactgcacgtccgctggtggcaatcacattcgcgcccagcatccgactcatcccggcgacgccgatcgctgacaacaggccgccaatagtggttgggatcagacagaccagcagcgccaccagtaccgttacactcacggcattaccgccccacgcggaaaacggccacagcgtggcggttgccagtaaaaagacgatggtcagagcaatcagcaggatagtcagggcaatctcgttcggtgttttgcgtcgctgtgcgccttccaccatcgcgatcatccgatccagaaatgtctcaccggggttaacgctacactcaatcaccagccagtcagaaagaatacgcgtgccgccggtgacggaggcaaaatcgccgccggattcacggatcaccggtgccgattccccggtgatggcgctttcatcgaccgatgcgccgccttcaatgacttcaccatcgcaggggataatatcgccagcttctaccagcacgatgtcacctttacgcagttgatcggcaggaactttgtccgccgcagcgccatatttcggctcacgcagcttgcgggcaaaggcagtttttttcacccctttaagactgttggcctgcgctttactgcggccttctgccagcgcctcggcgaaattagcgaacagtacggtgacccacagccagccgctaattgccgcgctaaacagcgcattgccaggcatcgcaccgcttgccatcgcgatgctaatacaggtggtcagcagactgccgatccagacgataaacatcaccggattgcgccattgcgcctgcgggtttaattttttcaccgcttctttcagcgcctgaacgacaagtgttggttcgaatagcgccagttgtttacgactcatattcagtgctcactcaatatcatcaggagagatattccgccaccggaccaagcgccagggcagggataaaggtcagtgcgccaaccagcaacacggtgccgattaacaggccaacaaacagcgggccgtgcgttggcagcgtgccggagctggcgggttggctctttttactcaccagcgaaccggcaattgccatcaccgggataatcaccccgaagcgaccgacaaacatgcagaacgccagtaaacagttccagaacggggagttggcgcttaatccggcaaaggcgctgccgttgttgttagcggcggatgacacggcgtacagcacttcgctaaaaccatgcgggccagggttgagcatggcgctacgtccggcgtcggtcatcattgccagcgccgcgcccatcagcaccagcgtcggggtaaccagaatcgccagtgcagtcagtttcatctcgcgtacgtcgattttttacccagatattccggtgtacgaccaatcatcagcccggcaataaacaccgccagcaggacaaacagcatcatgccgtaaagaccagaaccgacaccgccgaacaccacttcaccaatttgcatcagccacatcggcaccatgccaccgagagcggtaaacgaatcatgcatcgcaatcaccgcgccacaggaagccgccgtagtcacgaccgcaaacaggctactgaccagcacgccgaaacggctctctttaccttccatattgatgctgctgtctgcgccgagcgccagcagatgaggattaccctgaacttctgcccacatcaccacgcctacgcagatgacaaaaatcactgacatcgcccacagcaacatgcgcccctggcggcgatcgcccgtcacttcaccaaaggcaaagcacagcgccgttgggatcaagaagatcgccagcatctgcacgaagttggtcagtgcggttgggttttcaaacggatgcgacgagttggcattaaagaagccaccgccgttagtaccgagcatcttgatcgcttcctgagaagctacaggccccatgggtaacagctgttgcgctccttcaacggtattcacagcctgataaggctgaaagttttgcagcgcaccttgttgaataaaaaacagtgcgatcaacaacgccacagggacgagcacccataacgtgatgcgtagcagatcgacccaggcattcccgagtgtgctcatgctctggcgggtaaacgcacggatgagggcaaaaatcaccgcaatcccgctggcggcagaaagaaagttttgcaccgttaagccagccatctggctgaaatagctcaacgtggtttcaccgctgtaagattgccagttggtattcgtgacaaagctgacggcggtattcagcgccagatcccacgacagccccggcaactgctgtggattaagcggcagatagtgctgaccgagcaacataaaaaacagcaccgccagccccagcatgttcaggccgagaatggcacaaagatattgcttccagttcatctcatggtcagagacgccaggtaaacgaaagagtatacgttcaacgcccgctgtacctggaagaggaatgtcattaatcagccgcgccagcccgctgcctaaaggacgcgccagcaccattaacaccagtaaaaacgtggcgatcagtaagaacccttgcgcagccatcagaacgcctccgcattgatcagggcataaaccagataacccagtaataaaaacaccagcaatacgccggttatcacgcctgcactcacagtgcacctccagtggcctaaaagtgataccggaagggtagaattctggctgcaaagatttcgcaaaaatctgcgggcggggtgtaaaaaaagtataaaaatggcaaaagccatgatttaactaatgtttagtattaatttaacttttgtgtaacttaattacaggatgaatgtaaataaaccatcaataagcaaaaataagtggtcggatgagtagtaaaattacacaaaaggcggtactattttcatcagataaacaaattcatttttccggtgccattcaccgggtagatacaaaagggggagaaaagtatggaactctacagagaatatcctgcatggcttatctttttacgccgtacttatgcggttgcagcgggcgttctggcgctgcctttcatgcttttctggaaagaccgcgcccgcttttacagctacctgcatcgcgtctggtcgaaaaccagcgataaaccggtgtggatggatcaggccgaaaaggcaactggtgatttttattgattgctgagttttgaatacattgaaaaccgccagcggaaacgctggcggttttttgtatcaggaagatgttcagaggaatatttagacatcgttataccaatcgaaacatatattcatgaaatatatataaatattttcctaattgttcttatctgacagatatctcacttaaggctttcttataaatctgtagggttttgcctggaagcagacaaataacccgataaaacaaggatgagcagatgagcggaaaaccggcagcgcgtcagggcgacatgacgcagtatggcggtagcattgtccagggttcagccggggtgcgcatcggtgcccccaccggcgtggcctgttcggtgtgccccggcggggtgacgtccggccatccggtcaatccgctgctcggtgcaaaggtccttcccggtgaaaccgacatcgccctgcccggcccgctgccgttcatcctctcccgcacctacagcagttaccggacaaaaacgcccgcgccggtggggagcctcggccccggctggaaaatgcctgcggatatccgcttacagctgcgcgataacacactgatactcagtgataacggcggcagaagcctgtattttgagcacctgtttcccggtgaggacggttacagccgcagcgagtcactgtggctggtgcgcggcggcgtggcgaaactggatgaaggtcaccggctggccgcactctggcaggcgctgccggaagaactccgcttaagtccgcatcgttatctggcgacaaacagtccgcaggggccgtggtggctgctcggctggtgtgagcgggtgccggaagcggatgaggtgctgcctgcgccgctgccgccgtaccgggtactgaccgggctggtggaccgcttcgggcgcacacagacgttccaccgcgaagccgccggtgaattcagcggcgaaatcaccggcgtgacggatggtgccgggcgtcacttccggctggtactgaccacgcaggcgcagcgggcagaagaagcccggcagcaggccatttccggcgggacggaaccgtccgcttttcctgataccctgccgggttacaccgaatatggccgggacaacggcatccgtctgtctgccgtgtggctgacgcacgacccggaatacccggagaatttacctgccgcgccgctggtgcgctatggctggacgccacgcggcgaactggcggcggtgtatgaccgcagcaatacacaggtgcgcagctttacttacgatgataaataccggggccggatggtggcgcaccgtcacacgggccggccggaaatccgttaccgttacgacagcgacgggcgggtgacagaacagctaaacccggcaggcttaaactacacgtatcagtatgagaaggaccgcatcaccatcaccgacagcctggaccgccgtgaagtgctgcacacgcagggcgaagccgggctgaagcgggtggtgaaaaaggaacacgcggacggcagcgtcacgcagagtcagtttgacgccgtgggcaggctcagggcacagacggatgccgcaggcaggacaacagagtacagcccggatgtggtgacgggcctcatcacgcgcatcaccacgccggatggcagggcatcggcgttttactataaccaccacagccagttaacgtcagccaccgggcctgacgggctggaaatacgccgggaatatgatgaatccggccgtctgattcaggaaaccgcccctgacggcgatatcacccgctaccgttatgataatccacacagtgacctcccctgcgcaacggacgatgccaccggcagccggaaaaccatgacgtggagccgttacggccagttgctgagcttcaccgactgttccggctaccagacccgttatgaccatgaccgcttcgggcagatgacggcggtgcaccgcgaggaagggctgagccagtaccgtgcatacgacagccgtggacagttaattgccgtgaaagacacgcagggccatgaaacgcggtatgaatataacgccgccggtgacctgaccaccgtcattgccccggacggcagcagaaacgggacacagtacgatgcgtggggaaaggccatctgtaccacgcagggcgggctgacgcgcagtatggaatacgatgctgccggacgggtcatccgcctgaccagtgaaaacggcagccacaccaccttccgttacgatgtactcgaccggctgatacaggaaaccggctttgacggccgcacacagcgttatcaccacgacctgaccggcaaacttatccgcagcgaggatgaggggctggtcacccactggtactatgacgaagcagaccgcctcacgcaccgcaccgtgaatggcgaaaccgcagagcggtggcagtatgacgaacgcggctggctgacagacatcagccatatcagcgaagggcaccgggtgacggtgcattacgggtatgatgagaaaggccggctgaccggtgagcgtcagacggtgcatcacccgcagacggaagcactgctctggcagcatgagaccagacatgcgtacaacgcgcagggactggcgaaccgctgtataccggacagcctgcccgccgtggaatggctggcctacggcagcggttacctggcaggcatgaagctcggcgacacaccgctggtggatttcacccgcgaccgcctgcaccgggaaacgctgcgcagcttcggccgttatgaactcaccaccgcttatacccctgccgggcagttacagagccagcacctgaacagcctgcagtatgaccgcgattacacctggaacgacaacggcgaactcatccgcatcagcagcccgcgccagacccggagttacagctacagcaccaccggcaggctgaccggcgttcacaccaccgcagcgaaccttgatatccgcatcccgtatgccacagacccggcaggtaaccgcctgcccgacccggagctgcacccggacagcaccctcagcatgtggccggataaccgtatcgcccgtgacgcgcactatctttaccggtatgaccgttacggcaggctgacggagaaaaccgacctcatcccggaagggggtatccgtacggatgatgagcgcacccaccggtaccattacgacagtcagcaccggctggtgcactacacgcggacacaatatgcagagccgctggtcgaaagtcgctatctttacgacccgctgggccgcagggtggcaaaacgggtgtggcggcgtgaacgggacctgacgggctggatgtcgctgtcacggaaaccgcaagtgacctggtacggctgggacggcgaccggctgaccacaatacagaacgacagaacccgcatccagacgatttatcagccggggagcttcacgccactcatcagagttgaaaccgccaccggtgagctggcgaaaacgcagcgccgcagcctggcggatgcgcttcagcagtccggcggcgaagacggtggcagtgtggtgttcccgccggtgctggtgcagatgctcgaccggctggaaagtgaaatcctggctgaccgggtgagtgaggaaagccgccgctggctggcatcgtgcggcctgaccgtggagcagatgcaaaaccagatggacccggtgtacacgccggcgcgaaaaatccacctgtaccactgcgaccatcgcggcctgccgctggcgctcatcagcacggaaggggcaacagcgtggtgcgcagaatatgatgaatggggcaacctgctgaatgaagagaacccgcatcagctgcagcagcttatccggctgccggggcagcagtatgatgaggagtccggcctgtattacaaccgccaccgctattatgacccgctgcaggggcggtatatcactcaggatccgattgggctgaagggggatggaatttttatcagtatccgttgaatccgatctcaaatatagatccattaggattagaaacactaaaatgcattaagccactgcattcaatgggcggaactggtgaaagaagcggtccagatatatgggggaatccgttctatcatcaatatctttgtgtcccagatggtaaaggggactatacttgtggtggccaagaccaacggggagaatcaaaaggagatggtctatgggggccaggtaaagcaagtaatgatacaaaagaagctgctggccgttgtgacctcgttgaaaccgataatagttgtgtggagaactgtttaaaagggaagtttaaagaggtaaggccgcgttattctgtattgcctgatatattcacacctataaatttagggctatttaaaaactgccaagactggtctaatgattctttagaaacatgtaagatgaagtgctccggaaataacattggacgttttattagatttgtattcaccggagtgatgtaatgaaatatattatttttttattcagagctatatggctggctttatcgcttttaatactattcttttccatgcatagactttcactattagactccactcgtgatgtgagcgagttaattagtctcatgtcttatggaatgatggtaatatgttttccaacaggcatagtattctttattgctctaatatttatagggactgtatcagacattattggcgtaaggattgatagtaagtatattatggcgataataatatggctttattttctgtcaggagggtatattcaatggtttgtattaagtaagcgcattataaacaaataaattaagttaattgctcttattattatatgtaacctgggcattgatatcccgtatgccacagacccggcaggtaaccgcctgcccgacccggagctgcacccggacagcaccctcagcatgtggccggataaccgtatcgcccgtgacgcgcactatctttaccggtatgaccgttacggcaggctgacggagaaaaccgacctcatcccggaagggggtatccgtacggatgatgagcgcacccaccggtaccattacgacagtcagcaccggctggtgcactacacgcggacacaatatgcagagccgctggtcgaaagtcgctatctttacgacccgctgggccgcagggtggcaaaacgggtatggcgrcgtgaacgggacctgacgggctggatgtcgctgtcacggaaaccgcaagtgacctggtacggctgggacggcgaccggctgaccacgatacagaacgacaggagccgcatccagacgatttatcagccggggagcttcacgccactcatcagggttgaaaccgccaccggtgagcaggcgaaaacgcagcgccgcagcctggcggatacccttcagcagtccggcggcgaagacggtggcagtgtggtgttcccgccggtgctggtgcagatgctcgaccggctggaaagtgaaatcctggctgaccgggtgagtgaggaaagccgccgctggctggcatcgtgcggcctgacggtggagcagatgcaaaaccagatggacccggtgtacacgccggcgcgaaaaatccacctgtaccactgcgaccatcgcggcctgccgctggcgctcatcagcacggaaggggcaacagcgtggtgcgcagaatatgatgaatggggcaacctgctgaatgaagagaacccgcatcagctgcagcagcttatccggctgccggggcagcagtatgatgaggagtccggcctgtattacaaccgccaccgctattatgacccgctgcaggggaggtatatcactcaggatccgattgggctgaaggggggatggaatttttatcagtatccgctgaatccggttcagtatatagattcaatgggactggcatcaaaatatggacacttaaataatggcggatatggagcgagacccaacaaaccgcctacgcccgatccaagtaaattgccggacatagcgaaacaattaagactgccatatcctattgaccaggccagtagtgcgcctaatgttttcaaaacattcttcagagcattaagcccttacgactacacactgtattgcaggaagtgggtaaaaccaaatctgacttgtacgccacaggatgattcccagtatccagggatggatataaagacagcaagtgattacctgccacagacaaattggccaacaactcaattaccaccaggatatacttgtgcagaaccctatttattcccagacattaataaacccgatgggccagcaacagcagggatagatgatttgggtgaaattttagctaagatgaaacagagaacatcgagaggaataagaaaatgaaaagagttttgttctttttgctgatgatatttgttagttttggtgttatagctgattgcgaaatacaagctaaagatcatgattgttttactattttcgctaagggtactattttttccgcgtttcctgtcttaaataataaagccatgtggagatggtatcagaatgaggacatcggtgagtattattggcaaacagaactgggtacatgtaaaaataataaattcacaccaagcggggtgagactcttaattcgcgtcgggtcactacgccttaatgaaaatcatgccatcaaaggaacgttgcaggagttgataaatacagcagaaaaaacggcgtttctcggcgatcggtttagaagttatataagagcgggtatctatcaaaaaaagagcagtgatccagttcagttgttggcagtccttgataattcaatcatggtaaaatattttaaagatgagaaaccaacttatgctcgaatgacagcacatctcccgaacaaaaatgagtcttacgaatgtttaataaagatacagcatgaactaattcgtagtgaagagaaataaaatctcttcctgagaaaacaaattaatcattgtgaaaaattatataactcatggaataggtgtttattttgcgttccatttgcagggaaagatcacgtaacgctacttttttgtactaaataattcgaattttaagttcaacaattgagatactacttattgtctaaagctgtttttcatagcttatacatgatcaaatactccttacataaataaggtgaacaaatggaacttaaaaaattgatggaacatatttctattacacccgattacagacaagcctggaaagtggtgcataaattgtcagatattctactgttgactatttgtgccgttatttctggtgcagaaggttgggaagatatagaggatttcggggaaacacatctcgattttttgaagcaatatggtgattttgaaaatggtattcctgttcacgataccattgccagagttgtatcccagggaaagatcacgtaacgctacttttttgtactaaataattcgcattttatgtttaaaaattgagatattccttattacctaaagctgtttttcatagcttatacatgatcaaatactccttacataaataaggtgaacaaatggaacttaaaaaattgatggaacatatttctattattcccgattacagataagcctggaaagtagagcataaattgtcaggcatcctactattgactatttttgccgttatttctggtgcagaaagttgggaagatatagaggatttcggggaaacacatctcgatttcttgaagcaatatggtgattttgaaaatggtattcctgttcacgatactattgccagagttgtatcctgtatcagtcctgcaaaatttcacgagtgctttattaactggatgcgtgattgccattcatcaaatgataaagacgtcattgcaattgatggaaaaacgctccggcactcttatgacaagagtcgccgcaggggagcgattcatgtcattagtgcgttctcaacaatgcacagtctggtcatcgggcagatcaagacggataagaaatccaatgagatcacagctatcccagaacttcttaacatgctggatattaaaggaaaaatcatcacaaccgatgcgatgggttgccagaaagatattgcagagaagatacaaaaacagggaggtgattatttattcgctgtaaaaggaaaccagggcggctaaataaagccttcgaggaaaaatttccgctgaaagaattaaataatcccaagcatgacagttacgcaattagtgaaaagagtcacggcagagaagaaacccgtcttcatattgtttgcgatgtccctgatgagcttattgatttcacgtttgaatagaaagggcagctatggttagaaactacctgacgtcagtccttgcggggagcaggctttcgtaaatttgtcctgctacaacaggattaacttcacaaatatcatttctcaacgtctacacttactcctgtaaaccgttcaggagcagtaatgaatcagcaacgatttgatgacagcaccctaatccgtatcttcgcccttcatgagttacatcgactgaaagaacatggcttaacgcgcggggcgcttctcgattatcacagccgctataaactcgtctttctggcgcattctcagccggagtaccgcaaacttggcccgttcgtggctgatattcaccagtggcaaaatctggatgatttttacaaccagtactaccaacgcgtaattgttttgctttctcatcccgccaacccgcgcgatcacaccaacgttttgatgcacgttcagggttattttcgcccgcatattgattccacagaacgccagcagttggcggcgcttatcgacagttatcgccgtggcgagcaaccacttcttgcgccgctgatgcgtatcaaacactatatggcgctttatcctgacgcctggctttcagggcagcgttatttcgaactttggccgcgtgtgattaacttgcgccattcaggagttttatgattacccatctggtctggtttcgccaggatttacgtctgcacgataatctcgcactggctgccgcctgccgcaattcgtctgcacgcgtgctggcgttatatatcgctacaccacgccagtgggcgacgcataacatgtcgccgcgtcaggctgaacttatcaatgctcaactgaatgggctacaaatagcgcttgcggaaaaaggtattcctttattgttccgtgaagtggatgactttgtcgccagtgtcgaaatagttaaacaggtgtgcgcggaaaacagcgttacccacctgttttataactatcagtatgaagtgaatgagcgggcgcgggatgtggaagttgaaagagcgctgcgtaacgtggtgtgtgaaggatttgatgacagcgtgatcctgccgcctggcgcggtgatgaccggtaatcacgagatgtacaaagtctttacgccttttaagaatgcctggctgaaacggctgcgggaagggatgccggagtgtgtcgctgcgccaaaagttcgtagtagcggatcgatagagcccgcgccatccattacgctgaattatcctcgtcagtctttcgatactgcgcatttcccggtggaagaaaaagcggcgattgcgcaattacgccagttttgccagaacggtgccggagaatatgagcaacaacgagattttccggcagtggaaggcaccagtcgtttgtccgccagcctggcaacgggcgggttatcgcctcgccagtgtttgcatcgcttgttggcggaacagccgcaggcgctggacggtggggccggtagtgtctggcttagtgagctgatctggcgcgagttctaccgtcatctgatgacgtattacccctcgttgtgtaaacattgtccgtttattgcctggacggatcgtgtgcagtggcaaagcaatcccgcacatttacaggcctggcagaaaggcaaaacgggatacccgattgttgatgccgctatgcgtcagcttaacagcactggctggatgcataaccggctacggatgattacagccagttttctggtgaaagatttgttgatcgactggcgcgaaggcgagcgatatttcatgtcgcagctgattgatggtgatttggcagctaataacggtggctggcagtgggcggcttctacgggtactgatgctgcgccgtattttcgtattttcaatccgataactcagggcgagaaatttgatcgcgaaggtgagtttatccgccgatggttaccggagctgcgcgatgtaccagggaaagcggtgcatgagccgtggaagtgggcgcagaaagcaggtgtgaagctggattatccgcaaccgatagttgatcacaaagaggcaaggctgcgaacgctggcagcgtacgaagaagcgaggaaaggagcctgataaaacgcagcgagcgttttatcaggtatggtgctggcctattatgactccagcgccagcgcgcggtttctgaatttcagcgcctgatacagccaaatcatcagtaccagtcctacacacgccagtgcgccccaggtaatttgatcaaatacttcaatatatgcattgatggagtagttgatcgccccggaagcatcaaacgaagcctgcgatgtctgatcggcaatcacgcccgccagatagttcgcgatcgcgccagaaagcagcatgtagatgccggttaatacgccggtcacgcccggaatttcaatgcgcgtaatttgcgacatggcaaccgggtcgataaacagttccgcaaagcccatcaccgccaggcctaataccatcagtggcagagaagagtgaccatacattgcggaccagcgggcgcttaaggtcagaatgcagaatccggcgctcatcaggccaaggccaagagcaaatttcccccagatgcgcacggtacgattacccgcgacgctttctttaaccacccacgccaggaacacaccgcacagcataactgcgaaggcattaatcgactggaacatagcagtcggaacggtataaccaaacatatcgcggttaacgaagcggtcgatataaaggctaatcgagctgccgccctgttgtgcgaaggcccagaacaacatactgaagaaggtgagcgtcacaatcagccccagctccttacgctgtttctggttttctgctttgcgataaatttttgccagtacacccaggccaataatagtcgcgacaattaaggcgtataccgaccactctttccagaacagtacggtaatcagcgcaggcgttgccaccagcagaaccagcagccatccccagttaggcaggagaaagtttgttgcacgcagtacttttttattaacgccgcgggtatgtgtgaaatgacgattgccacataagaaaatgaccagacccgcgatcatacccaccgccgccaggccaaagcccatcgcccagctgtactcttcctgggcgtaaccacaggcgataggtgcgataatagaccccacgttacccgctgcatacatcagcgagaaaccgccatcacgacgcggatcggttggctcatacagctcgccgagcaggcaactgacattggatttaaacagaccatagccacaaacgataatcgccagggacagatagaggaatgacggatggatctcactggcacccagcaccacatgaccgatcgccatcaacaacgcccccagcatcaccgccatgcgattgccgagaactttatccgccaaaaagccaccgaggattggcgtgacatacaccagcgaacagtaggcgctaaataactcgtaggcgtgagtatcgttgtattttagttgattggtgagatagagaatcagcagggcacgcatgccgtaaaagctaaaatattcccagatttgcagcgcaacgacatagtaaatagcgcgcggttgtgatgcgtgtttattcataataattccacaattgacggcaacgtcacgtaatagttgcgcggcgtgcttgtgtttccttaaagttaaaactttgatacagatctgattatttatgcaatatgctgtctgattgcataaatatacattagctgaagcgtgatgatataaacaatttgcgtcttttggcgtcgggtttgtttcttaatatgtcaaaagattggctatcgacgaacaggcgaggtaacgctatgttaacggtgtagctatcagaatacggaaggcgcgaagatgaaaaacaccgaactggaacaactgattaacgaaaaactgaacagcgcggcgattagtgattacgcgccgaatggtttgcaggtggaaggcaaagagacggtgcaaaaaattgttaccggtgtcaccgccagccaggctttgctcgatgaggcagtgcgtctgggcgcggatgcggtcattgtgcatcatggctacttctggaaaggagagtctccggtcattcgcggaatgaagcgtaaccgtttaaaaacgttgctggcgaatgatatcaacctgtatggctggcatttgccgcttgacgcacatcctgagctgggcaataacgcacagctggcggcgttactggggatcacggtcatgggcgaaattgagccgttggtgccgtggggagagctgaccatgcctgtgccgggactggaactagcctcctggattgaagcgcgtctgggacgtaagccgttatggtgtggcgataccggacctgaggtggtccagcgcgtcgcctggtgcacgggcggcgggcaaagttttatcgatagcgccgcgcgttttggcgtggatgcttttattactggcgaagtttctgaacagaccattcattcagcccgcgagcaggggttgcatttttatgctgcaggtcaccatgccactgaacgtggtggtattcgcgcattgagcgagtggctgaatgaaaataccgatcttgatgtgacctttattgatattcctaatcctgcataacgaataatcagagggatcgaaagtgcaacgagcgcgttgttatctgataggtgaaacggcggtagtgctggaactggaaccgccggtgacgctggctagccagaaacggatctggcgactggcgcagcgtctggtggatatgccgaatgtggttgaagccattcccggcatgaacaatatcacggtgattttgcgtaatcctgagtcgctggcgctggatgccatagagcgtttgcaacgctggtgggaggagagcgaggccctggaacctgagtctcgctttattgaaattccggtggtttacggtggtgcaggcggaccggatttggcggtggtcgcggcgcattgcgggttgagcgaaaaacaggttgttgaattgcactcctccgtggaatacgtggtctggtttttaggttttcaaccgggcttcccgtatctcgggagtttgccggaacaactacacacgccacggcgcgctgaaccgcgcttactcgttccggcaggttctgtcgggatcggagggccgcagactggtgtttatccgctggcaacgccgggtggctggcagttgattggtcatacctcactcagcctgtttgatccggcgcgtgacgaacccatcttattacgtccgggagacagcgtgcgctttgtaccgcagaaggagggagtatgctgaagattattcgtgcgggcatgtataccactgtgcaggatggcggtcgtcacggttttcgccagtcgggtatcagccactgcggcgcactggatatgcccgcgctgcgcattgctaacctgctggtgggtaatgacgccaatgcccccgcgctggagatcacgctcggtcagttaacggttgagttcgaaactgatgggtggtttgctctgacaggggccggttgcgaagcgcggctggatgataatgccgtctggaccggctggcgattgccgatgaaagcaggccagcgtttaacgcttaaacgcccgcagcacgggatgcgcagttatctggcggtcgcgggtggtattgatgttccgccggtaatggggtcatgcagcaccgatctcaacgtggggattggcgggctggaaggccgtttactgaaggatggtgaccgactcccgattggcaaatcgaagcgtgattttatggaagcgcagggcgttaaacagctgctgtggggcaaccgcattcgcgccttgccggggccggaatatcatgagttcgatcgcgcctcgcaggatgcattctggcgttcgccctggcagcttagcccgcaaagtaaccgcatgggctatcgcttacaggggcaaattttaaaacgcaccaccgatcgcgaactgttatctcacggtttgttaccgggtgtggtgcaggtgccgcataacgggcagcctattgtgttgatgaacgacgcacagaccaccggtggttacccgcgtattgcctgtatcattgaggctgatatgtaccatctggcgcaaattccactcggtcagccgattcattttgtccagtgttcactggaagaggcactgaaagcgcggcaagatcaacaacgttatttcgaacaattagcgtggcggctacacaatgaaaattgacctgaacgccgatctgggcgaaggctgcgccagcgacgcagagctattaacgctggtttcctctgccaatattgcttgtggatttcatgcaggcgatgcccaaaccatgcaggcttgcgtgcgtgaagcaataaaaaatggtgtcgcgattggcgctcacccgagttttcccgacagggaaaattttggtcgcagcgccatgcagctgccgccagaaaccgtttacgcccagacgctgtatcaaattggcgcgctggcaacgattgcccgtgcgcaaggcggcgtaatgcgtcatgtcaaaccgcacggcatgttgtacaaccaggcggcgaaagaagcacaactggcagacgccatcgccagagcggtatacgcttgcgatccagcattggttctcgttgggctggcaggaagcgagctgattcgtgcaggcaagcaatatggcctgacaacgcgcgaggaagtgtttgccgatcgcggttatcaggctgacggctcgctggtgccgcgaagtcagccaggcgcgttgattgaaaacgaagaacaggcgctggcgcaaacgctagagatggtgcaacacggcagagtcaaaagtatcaccggcgaatgggcaacggtcacggcgcaaacagtctgcctgcatggcgacggcgagcacgcactggcgttcgcccgccgactacgctctacatttgccgaaaaggagattgttgtcgcagcataaccccgattaataaagaatgaaaaaaggatatcaccatgcctgaaggcccggagatccgccgtgcagcggataacctggaggcggcgatcaaaggcaaaccactaactgatgtctggtttgccttcccgcagttaaaaacttatcaatcacaacttatcggtcaacacgttacccatgtggaaacgcgtggtaaggcgttgttaactcatttttccaacgacttaacgctctacagccataatcagctttacggcgtctggcgcgtggttgataccagcgaagagccgcagaccacgcgagtattgcgggtaaaactgcaaacggctgacaaaaccattctgctttatagcgcctcggatattgagatgttgaggccggaacaactgaccacgcatccgtttttacaacgcgttggtcccgatgtgctggatccgaatctgacgccggaggtggtaaaggaacggttattgtcaccgcgctttcgtaaccgtcagtttgcaggattactgctcgatcaggcgtttctggctgggcttggcaattatttgcgggtggagatcctctggcaggttgggttgactggaaatcataaagcgaaagatctcaatgcggcgcaactggatgcactcgcacacgcgttactggagattcctcggttttcttacgctacgcgggggcaggtggatgagaataagcatcatggggcgctgtttcgctttaaggtttttcatcgtgatggcgaactgtgcgaacgctgtggcggcatcattgagaaaaccacgttgtcctcgcgcccgttttactggtgtccaggctgccagcactaggccgaccgcttcggcgcataggttgaaataaaccgcgcaatggctggccccgtcagcaaaatactgaacaggcgcagggtttgcatcgccataataagcgccatatcggcattgctccctgcggcgatgaccgccacggtatcaagcccgccgggactggtggcgaggtaggcagtcataaaatcaatatgcataaaccgggtcagcccccacgccatacccgcacaaatagccagcagagcaaaaatcgacagcaggatttgcggtagcgggcgtagtgcccgcagtaagatttgtttatcgaaaccaagaccaatccgccagccaattgccatatacgccatcgccagcagccattccggtagttcgatggtgatgagctgaccagactggagcactgcgcccgccagcatcgggatgagcatcgtgccggaaggaagacgcagcatgcatcccgccgtaccggcaacgactgcgagcaaaatcgtaagcaggagattaatgctcactggcgggaaccagacgatttgctggttaaccgcttcagcgttatcacccagcatcatgcgggtgaccagaacagcggcccccgcgacgaacagcactcgcagatattgcataaacgccaccaggcgaatatctgcgccgtaatcttgcgccatagcgaccattgccgctgcgccgcctggagaagaaccccaggcaccggtatttccaggcagtgagctatagcgcaccaataaccaacccacgatggcgctggaaagcagcgtcaccagtaaaatagcaagcacgatcggccagttggcggccagcgtggtgagaatcgaaccagtgaggttttgcgcaatcatgcagccaagaatggcctgcgcggcgagaaaagcggagcggggaagttgcagagtaattccgcgcatactgaagatgatcccggcgatcatcggcccaagtaatagcgccgccgggagatgtaccgcgaggaaaccaatagaaaggagaagtgatagcacacataacattccccactgcaaaactggcatccttcgctccctcattattttctctttggtgtatcgatacagcataaagaaagccgggccaggaaaaaataacagcaatcaaggaaaaggggaaaatcagcaattttctgaaagagatgccctttccggctgcaaagggcatcatggcaaatcagttatagttaattttaaaaagcaccactgtatcgaagggcccagcctcgatgggggtacctgcaatggacgaaagttcagccgtataggttttttcgtagaccaacatgtcgctggtgaaatcggcgtattcagcatatttattgaaggtataaggcgaggcgttttcatccagcaaacgtagcttcagaccattaccaatcaacaatgctttatcttcttcaaccaacgtttcttcggtataaaaggaggaactgactttaaatccgtcggtgcattggtcattttgtgattttgtcgtcttaatactgaatgttttcgacattgtgtggcgacgaatatccagcaaattaaatttaccaaaatcaatcacctgtgtttccggtgaaatggaaaaattgacgctgcaatccagcacgcgaatgttttccagaccggtaatatgatatttcaggttttgggcagtaggatcttcgttaacgctaccggcaccgtcaaattgcacgacgatatagtcgctaagcgtactttgataatcatgcggcggcatttctcgtattttgacgtataaccgcatgcgagcgagaaaggtacgcgacatgtgaatattagcgggatcacccgagcaaattttgttctgccatcccatcgcgataatctgctcagggggtaatgactccaacttattgatagtgttttatgttcagataatgcccgatgactttg

SEQ ID NO: 116 - DNA, 65083 bp, Escherichia coli
aacagaagccactggagcacctcaaaacaccatcatacactaaatcagtaagttggcagcatcacctttgtgccagttaatcttttgcccgttactgatttggttattatttaccgcaacgctaacaaaatactcaccgggagcaatgactcctttttcctttaataatgaaatatcaatgcggtcgcgcattgatttatcgagaacattaaggttgaattcgaccgccaatgcgcaaggcatcgccacgaccaggcaggatacaaaagagagtcgataaatattcacggtgtccatacctgataaatattttatgaaaggcggcgatagcgccgccaaagtaatacttatttataatccagcacgtaggttgcattcgccgtaactgcgcctggcgttacaggtgtagcctgatcaatttgttccatccaggcaaagaaattcagcgtttgttcgctggaggtcggagccaggtcgatatctggagtagcggtgcctaaaacgatattgctttgatctttattcattaaacgtacgccgacgccggtggcttcacccgtgctggtgttgttgagaatcggatctgcgccggtggttttcgctgagctatcaaaggtgactgcaactttagaaatcttgccaccggaaccgttgctggagttttccagatcacagttgactaagcgcaggtcgacagcaacggcatcgctgtgatgtgactgattaatgtggctggtggtcacctgaccgagttcaacctctttatcaatatcatcctgatgtatttcacacggtgcttcaataacttcacctttaaagtgaatttcaccggatccttcatcagccgcataaacaggtgctgtgaacagcagagatacggccagtgcggccaatgttttttgtcctttaaacataacggagtcctttaacagaaaagaaaaaagtatatcggtgcaagaatatcttatttgattgtcgaatgtttttagtttttcttaaaaatattattaattttattaaatgtaaaagtaattaattgatggtatgaattaaatgtttgatgaataacgtattggaaattataggggtgcgctatatttggtggtttattcatgtaactgagaggaagatagatgattaaaaatcatcgatttgtttataatttataccgatatattttttttagaatatatgaatgtccgatagtggattttatttttacaatttttgtgtttaggcatataaaaattaacccgccatttgaacggcgggttaaaatatttacaacttagcaatcaaccattaacgcttgatatcgcttttaaagtcgcgtttttcatatcctgtatacagctgacgcggacgggcaatcttcataccgtcactgtgcatttcgctccagtgggcgatccagccaacggtacgtgccattgcgaaaatgacggtgaacatggaagacggaatacccatcgctttcaggatgataccagagtagaaatcgacgttcgggtacagtttcttctcgataaagtacgggtcgttcagcgcgatgttttccagctccatagccacttccagcaggtcatctttggtgcccagctctttcagaacttcatggcaggtttcacgcattacggtggcgcgcgggtcgtaatttttgtacacgcggtgaccgaagcccatcaggcggaaagaatcatttttatctttcgcacgacgaacaaattccggaatgtgtttaacggagctaatttcttccagcattttcagcgccgcttcgttagcaccaccgtgcgcaggtccccacagtgaagcaatacctgctgcgatacaggcaaacgggttcgcacccgaagagccagcggtacgcacggtggaggtagaggcgttctgttcatggtcagcgtgcaggatcagaatacggtccatagcacgttccagaatcggattaacttcatacggttcgcacggcgtggagaacatcatattcaggaagttaccggcataggagagatcgttgcgcggataaacaaatggctgaccaatggaatacttgtaacacatcgcggccatggtcggcattttcgacagcaggcggaacgcggcaatttcacgatgacgaggattgttaacatccagcgagtcgtgatagaacgccgccagcgcgccggtaataccacacatgactgccattggatgtgagtcgcgacggaaagcgtggaacagacgggtaatctgctcgtggatcatggtatgacgggtcaccgtagttttaaattcgtcatactgttcctgagtcggtttttcaccattcagcaggatgtaacaaacttccaggtagttagaatcggtcgccagctgatcgatcgggaaaccgcggtgcagcaaaataccttcatcaccatcaataaaagtaattttagattcgcaggatgcggttgaagtgaagcctgggtcaaaggtgaacacaccttttgaaccgagagtacggatatcaataacatcttgacccagcgtgcctttcagcacatccagttcaacagctgtgtccccgttgagggtgagttttgcttttgtatcagccatttaaggtctccttagcgccttattacgtaagactgccggaacttaaatttgccttcgcacatcaacctggctttacccgtttgttatttggctcgccgctctgtgaaagaggggaaaacctgggtacagagctctgggcgcttgcaggtaaaggatccattgatgacgaataaatggcgaatcaagtacttagcaatccgaattattaaacttgtctaccactaataactgtcccgaatgaattggtcaatacttccacactgttacataagttaatcttaggtgaaataccgacttcataacttttacgcattatatgcttttcctggtaatgtttgtaacaactttgttgaatgattgtcaaattagatgattaaaaattaaataaatgttgttatcgtgacctggatcactgttcaggataaaacccgacaaactatatgtaggttaattgtaatgattttgtgaacagcctatactgccgccaggtctccggaacaccctgcaatcccgagccacccagcgttgtaacgtgtcgttttcgcatctggaagcagtgttttgcatgacgcgcagttatagaaaggacgctgtctgacccgcaagcagaccggaggaaggaaatcccgacgtctccaggtaacagaaagttaacctctgtgcccgtagtccccagggaataataagaacagcatgtgggcgttattcatgataagaaatgtgaaaaaacaaagacctgttaatctggacctacagaccatccggttccccatcacggcgatagcgtccattctccatcgcgtttccggtgtgatcacctttgttgcagtgggcatcctgctgtggcttctgggtaccagcctctcttcccctgaaggtttcgagcaagcttccgcgattatgggcagcttcttcgtcaaatttatcatgtggggcatccttaccgctctggcgtatcacgtcgtcgtaggtattcgccacatgatgatggattttggctatctggaagaaacattcgaagcgggtaaacgctccgccaaaatctcctttgttattactgtcgtgctttcacttctcgcaggagtcctcgtatggtaagcaacgcctccgcattaggacgcaatggcgtacatgatttcatcctcgttcgcgctaccgctatcgtcctgacgctctacatcatttatatggtcgtttttttcgccaccagtggcgaactgacatatgaagtctggatcggtttcttcgcctctgcgttcaccaaagtgttcaccctgctggcgctgttttctatcttgattcatgcctggatcggcatgtggcaggtgttgaccgactacgttaaaccgctggcattgcgcctgatgctgcaactggtgattgtcgttgcactggtggtttacgtgatttatggattcgttgtggtgtggggtgtgtgatgaaattgccagtcagagaatttgatgcagttgtgattggtgccggtggcgcaggtatgcgcgcggcgctgcaaatttcccagagcggccagacctgtgcgctgctctctaaagtcttcccgacccgttcccataccgtttctgcgcaaggcggcattaccgttgcgctgggtaatacccatgaagataactgggaatggcatatgtacgacaccgtaaaagggtcggactatatcggtgaccaggacgcgattgaatatatgtgtaaaaccgggccggaagcgattctggaactcgaacacatgggcctgccgttctcgcgtcttgatgatggtcgtatctatcaacgtccgtttggcggtcagtcgaaaaacttcggcggcgagcaggcggcacgcactgcggcggcggctgaccgtaccggtcacgcactgttgcacacgctttatcagcagaacctgaaaaaccacaccaccattttctccgagtggtatgcgctggatctggtgaaaaaccaggatggcgcggtggtgggttgtaccgcactgtgcatcgaaaccggtgaagtggtttatttcaaagcccgcgctaccgtgctggcgactggcggggcagggcgtatttatcagtccaccactaacgcccacattaacactggcgacggcgtcggcatggctatccgcgcaggcgtaccggtgcaggatatggaaatgtggcagttccacccgaccggtattgccggtgcgggcgtactggtcaccgaaggttgccgtggtgaaggcggttatctgctgaacaaacatggcgaacgctttatggagcgttatgcgccgaacgccaaagacctggcgggccgtgacgtggtggcgcgttccatcatgattgaaatccgtgaaggtcgcggctgtgatggtccgtgggggccacatgcgaaactgaaactcgaccacctgggtaaagaagttctcgaatcccgtctgccgggtattctggaactctcccgtaccttcgctcacgttgatccggtgaaagagccgattccggttatcccaacctgtcactacatgatgggtggtattccgaccaaagtgaccggtcaggcgctgacggtgaacgagaaaggcgaagatgtggttgttccggggctgtttgccgttggtgaaatcgcttgtgtatcggtacacggcgctaaccgtctgggcggcaactcgctgctggacctggtggtctttggtcgcgcagcgggtctgcatctgcaagagtctatcgccgagcagggcgcattgcgcgatgccagcgagtctgatgttgaagcatctctggatcgtctgaaccgctggaacaataatcgtaacggtgaagatccggtggcgattcgtaaagcgctgcaagaatgtatgcagcataacttctcggtcttccgtgaaggtgatgcgatggcgaaagggcttgagcagttgaaagttatccgcgagcgtctgaaaaatgcccgtctggatgacacttccagcgagttcaacacccagcgcgttgagtgcctggaactggataacctgatggaaacggcgtatgcaacggctgtttctgccaacttccgtaccgaaagccgtggcgcgcatagccgcttcgacttcccggatcgtgatgatgaaaactggctgtgccactccctgtatctgccagagtcggaatccatgacgcgccgaagcgtcaacatggaaccgaaactgcgcccggcattcccgccgaagattcgtacttactaatgcggagacaggaaaatgagactcgagttttcaatttatcgctataacccggatgttgatgatgctccgcgtatgcaggattacaccctggaagcggaagaaggtcgcgacatgatgttgctggatgcgcttatccagctgaaagagaaagatcccagcctgtcgttccgccgctcctgccgtgaaggtgtgtgcggttccgacggtctgaacatgaacggcaagaatggtctggcctgtattaccccgatttcggcactcaaccagccgggcaagaagattgtgattcgcccgctgccaggtttaccggtgatccgcgatttggtggtagacatgggacaattctatgcgcaatatgagaaaattaagccttacctgttgaataatggacaaaatccgccagctcgcgagcatttacagatgccagagcagcgcgaaaaactcgacgggctgtatgaatgtattctctgcgcatgttgttcaacctcttgtccgtctttctggtggaatcccgataagtttatcggcccggcaggcttgttagcggcatatcgtttcctgatcgatagccgtgataccgagactgacagccgcctcgacggtttgagcgatgcattcagtgtattccgctgtcacagcatcatgaactgcgtcagtgtatgtccgaaggggctgaacccgacgcgcgccatcggccatatcaagtcgatgttgttgcaacgtaatgcgtaattaaatgttgatgccggggaaatcccccggctattcaggaaatctttaaaaactgcccctgacactaagacagtttttaaaggttccttcgcgagccactacgtagacaagagctcgcaagtgaaccccggcacgcacataactgtgcgtggtagtatccacggcgaagtaagcataaaaaagatgcttaagggatcacgatgcagaacagcgctttgaaagcctggttggactcttcttacctctctggcgcaaaccagagctggatagaacagctctatgaagacttcttaaccgatcctgactcggttgacgctaactggcgttcgacgttccagcagttacctggtacgggagtcaaaccggatcaattccactctcaaacgcgtgaatatttccgccgcctggcgaaagacgcttcacgttactcttcaacgatctccgaccctgacaccaatgtaaagcaggttaaagtcctgcagctcattaacgcataccgcttccgtggtcaccagcatgcgaatctcgatccgctgggactgtggcagcaagataaagtggccgatctggatccgtctttccacgatctgaccgaagcagacttccaggagaccttcaacgtcggttcatttgccagcggcaaagaaaccatgaaactcggcgagctgctggaagccctcaagcaaacctactgcggcccgattggtgccgagtatatgcacattaccagcaccgaagaaaaacgctggatccaacagcgtatcgagtctggtcgcgcgactttcaatagcgaagagaaaaaacgcttcttaagcgaactgaccgccgctgaaggccttgaacgttacctcggcgcaaaattccctggcgcaaaacgcttctcgctggaaggcggtgacgcgttaatcccgatgcttaaagagatgatccgccacgctggcaacagcggcacccgggaagtggttctcgggatggcgcaccgtggtcgtctgaacgtgttggtgaacgtgctgggtaaaaaaccgcaagacttgttcgacgagtttgccggtaaacataaagaacacctcggcacgggtgacgtgaaataccacatgggcttctcgtctgacttccagaccgatggcggcctggtgcacctggcgctggcgtttaacccgtctcaccttgagattgtaagcccggtcgttatcggctctgttcgtgcccgtctggacagacttgatgagccgagcagcaacaaagtgctgccaattaccatccacggtgacgccgcagtgaccggacagggcgtggttcaggaaaccctgaacatgtcgaaagcgcgtggttatgaagttggcggtacggtacgtatcgttatcaacaaccaggttggtttcaccacctctaatccgctggatgcccgttctacgccgtactgtactgatatcggcaagatggttcaggcaccgattttccacgttaacgcggacgatccggaagccgttgcctttgtgacccgtctggcgctcgatttccgtaacacctttaaacgtgatgtcttcatcgacctggtatgctaccgccgtcacggccacaacgaagccgacgagccgagcgcaacccagccgctgatgtatcagaaaatcaaaaaacatccgacaccgcgcaaaatctacgctgacaagctggagcaggaaaaagtggcgacgctggaagatgccaccgagatggttaacctgtaccgcgatgcgctggatgctggcgattgcgtggtagcagagtggcgtccgatgaacatgcactctttcacctggtcgccgtacctcaaccacgaatgggacgaagagtacccgaacaaagttgagatgaagcgcctgcaggaactggctaaacgcatcagcacggtgccggaagcggttgaaatgcagtctcgcgttgccaagatttatggcgatcgccaggcgatggctgccggtgagaaactgttcgactggggcggcgcggaaaacctcgcttacgccacgctggttgacgaaggcattccggttcgcctgtcgggtgaagactccggtcgcggtaccttcttccaccgccacgcggtgatccacaaccagtctaacggttccacttacacgccgctgcaacacatccataacggccagggcgcgttccgtgtttgggactccgtactgtctgaagaagcagtgctggcgtttgaatacggttatgccaccgcagaaccacgcaccctgaccatctgggaagcgcagttcggtgacttcgccaacggtgcgcaggtggttatcgaccagttcatctcctctggcgagcagaaatggggccggatgtgtggtctggtgatgttgctgccgcacggttacgaagggcaggggccggagcactcctccgcgcgtctggaacgttatctgcaactttgtgctgagcaaaacatgcaggtttgcgtaccgtctaccccggcacaggtttaccacatgctgcgtcgtcaggcgctgcgcgggatgcgtcgtccgctggtcgtgatgtcgccgaaatccctgctgcgtcatccgctggcggtttccagcctcgaagaactggcgaacggcaccttcctgccagccatcggtgaaatcgacgagcttgatccgaagggtgtgaagcgcgtagtgatgtgttctggtaaggtttattacgacctgctggaacaacgtcgtaagaacaatcaacacgatgtcgccattgtgcgtatcgagcaactctacccgttcccgcataaagcgatgcaggaagtgttgcagcagtttgctcacgtcaaggattttgtctggtgccaggaagagccgctcaaccagggcgcatggtactgcagccagcatcatttccgtgaagtgattccgtttggggcttctctgcgttatgcaggccgcccggcctccgcctctccggcggtagggtatatgtccgttcaccagaaacagcaacaagatctggttaatgacgcgctgaacgtcgaataaataaaggatacacaatgagtagcgtagatattctggtccctgacctgcctgaatccgtagccgatgccaccgtcgcaacctggcataaaaaacccggcgacgcagtcgtacgtgatgaagtgctggtagaaatcgaaactgacaaagtggtactggaagtaccggcatcagcagacggcattctggatgcggttctggaagatgaaggtacaacggtaacgtctcgtcagatccttggtcgcctgcgtgaaggcaacagcgccggtaaagaaaccagcgccaaatctgaagagaaagcgtccactccggcgcagcgccagcaggcgtctctggaagagcaaaacaacgatgcgttaagcccggcgatccgtcgcctgctggctgaacacaatctcgacgccagcgccattaaaggcaccggtgtgggtggtcgtctgactcgtgaagatgtggaaaaacatctggcgaaagccccggcgaaagagtctgctccggcagcggctgatccggcggcgcaaccggctctggctgcacgtagtgaaaaacgtgtcccgatgactcgcctgcgtaagcgtgtggcagagcgtctgctggaagcgaaaaactccaccgccatgctgaccacgttcaacgaagtcaacatgaagccgattatggatctgcgtaagcagtacggtgaagcgtttgaaaaacgccacggcatccgtctgggctttatgtccttctacgtgaaagcggtggttgaagccctgaaacgttacccggaagtgaacgcgtctatcgacggcgatgacgtggtttaccacaactatttcgacgtcagcatggcggtttctacgccgcgcggcctggtgacaccggtactgcgtgatgtcgataccctcggcatggcagacatcgagaagaaaatcaaagagctggcagtcaaaggccgtgacggcaagctgaccgttgaagatctgaccggtggtaacttcaccatcaccaacggtggtgtgttcggttccctgatgtctacgccgatcatcaacccgccgcagagcgcaattctgggtatgcacgctatcaaagatcgtccgatggcggtgaatggtcaggttgagatcctgccgatgatgtacctggcgctgtcctacgatcaccgtctgatcgatggtcgcgaatccgtgggcttcctggtaacgatcaaagagttgctggaagatccgacgcgtctgctgctggacgtgtagtagtttaagcttcacctgcactgtagaccgacgtggatagggtgtcggtctacggtttaaaagataacgattactgaaggatggacagaacacatgaacttacatgaatatcaggcaaaacaactttttgcccgctatggcttaccagcaccggtgggttatgcctgtactactccgcgcgaagcagaagaagccgcttcaaaaatcggtgccggcccgtgggtagtgaaatgtcaggttcacgctggtggccgcggtaaagcgggcggtgtgaaagttgtaaacagcaaagaagacatccgtgcttttgcagaaaactggctcggcaagcgtctggtaacgtatcaaacagatgccaatggccaaccggttaaccagattctggttgaagcagcgaccgatatcgctaaagagctgtatctcggtgccgttgtagaccgtagttcccgtcgtgtggtctttatggcctccaccgaaggcggcgtggaaatcgaaaaagtggcggaagaaactccgcacctgatccacaaagttgcgcttgatccgctgactggcccgatgccgtatcagggacgcgagctggcgttcaaactgggtctggaaggtaaactggttcagcagttcaccaaaatcttcatgggcctggcgaccattttcctggagcgcgacctggcgttgatcgaaatcaacccgctggtcatcaccaaacagggcgatctgatttgcctcgacggcaaactgggcgctgacggcaacgcactgttccgccagcctgatctgcgcgaaatgcgtgaccagtcgcaggaagatccgcgtgaagcacaggctgcacagtgggaactgaactacgttgcgctggacggtaacatcggttgtatggttaacggcgcaggtctggcgatgggtacgatggacatcgttaaactgcacggcggcgaaccggctaacttccttgacgttggcggcggcgcaaccaaagaacgtgtaaccgaagcgttcaaaatcatcctctctgacgacaaagtgaaagccgttctggttaacatcttcggcggtatcgttcgttgcgacctgatcgctgacggtatcatcggcgcggtagcagaagtgggtgttaacgtaccggtcgtggtacgtctggaaggtaacaacgccgaactcggcgcgaagaaactggctgacagcggcctgaatattattgcagcaaaaggtctgacggatgcagctcagcaggttgttgccgcagtggaggggaaataatgtccattttaattgataaaaacaccaaggttatctgccagggctttactggtagccaggggactttccactcagaacaggccattgcatacggcactaaaatggttggcggcgtaaccccaggtaaaggcggtactacccacctcggcctgccggtgttcaacaccgtgcgtgaagctgttgctgctactggcgctaccgcttctgttatctacgtaccagcaccgttctgcaaagactccattctggaagctattgatgcaggcatcaaactgattatcaccatcactgaaggcatcccgacgctggatatgctgactgtgaaagtgaaactggacgaagccggcgttcgtatgatcggcccgaactgcccgggcgttatcactccgggtgaatgcaaaatcggtatccagccgggtcacattcacaaaccgggtaaagtgggtatcgtttcccgttccggtacactgacctatgaagcggttaaacagaccacggattacggtttcggtcagtcgacctgtgttggtatcggcggtgacccgatccctggctctaactttatcgacattctcgaaatgttcgaaaaagatccgcagaccgaagcgatcgtaatgatcggtgagatcggcggtagcgctgaagaagaagcggcagcgtacatcaaagagcatgttaccaagccagttgtgggttacatcgctggtgtgactgcgccgaaaggcaaacgtatgggccacgcgggtgccatcattgccggtgggaaagggactgcggatgagaaattcgctgctctggaagccgcaggcgtgaaaaccgttcgcagcctggcggatatcggtgaagcactgaaaactgttctgaaataaatatctgtaataagaaatagccctcgccgcttccctctacaggaatggcgaagggctgtcggtttcgacatggttggccatcgtatgatggccttttttgtgcttatcgcgatgattttcgttgcgctatcagggtaaatttatagtcatcggtattaaaagcgttgcggctatattcaaacacccgaccatcaactaaatatccacgcgatactttttcaagaatcggctttgtctggctgatattaagcagacggctcatctcttcggttggcatcagaggaatgatttcctgttcgctacgatcgataaccattttcttcacttcttcaataaagtgatattttgaattttccatgacctgccaggtgagatccgggaacaacgcaagcggcatccaggtttcttccagcgccattggcttttgcttgcgatagcgcacgcgcttcacatgccacacacgatcctgcgcggtgatttgtagctgttgctgaagaaaatcgtcagccggaatcacttcaaatatcaggacttcactgtgtgtatcgacgtgacggtccgacagtttttcatcaaaactggttaactgaaaaatatcgtaattgacccgctcttctttgacgtaagtcccgctgccctgaatgctttcgaggatctgttgctcgactaactggcgcaaagcctgacgcaccgtaacccggctgacgccaaactctgtttgtaatgccgattcggtaggtaacgcatcgccaggtttaagctcgccacgcgcaatttgttcacgaatgcgatcggcaatctgccggtataagggcttgtgtcccatttttagtatctcattaatacgaatttagccattatgcccgataaattcatcctgtaaataatacaaatacaatacaaataatttcaatcaagtgaaattgatcacataatggtattgttttatcgggcacactggcgcgactataaaaacgatcaagtgaggatcatgatgaatctgacgactctgacccaccgcgatgcgttgtgtctgaatgcgcgctttaccagccgtgaagaggccatccacgcgttgactcaacgtcttgctgctctggggaaaatttccagtactgagcaatttctggaagaagtgtatcgccgtgaaagccttggcccgaccgccttaggtgaagggttggctgtgccgcatggcaaaactgctgcggtaaaagaagcggcgtttgcggtcgccacactcagcgagccgcttcagtgggaaggcgttgatggcccggaagcggttgatttagtggtgctgctggcgattccccccaatgaagcgggtactacgcatatgcaactgctgacagcgctgaccacgcgcctggcggatgatgagattcgggcgcgtatacagtcggcgacgacgcctgatgagttgctctcggcgctggatgacaagggagacacgcaaccttctgcctctttttccaacgcgccaactatcgtctgcgtaacggcctgtccggcgggtattgctcacacctatatggctgcggaatatctggaaaaagccggacgcaaactcggcgtaaatgtttacgttgaaaaacaaggcgctaacggcattgaagggcgtttaacggcggatcaactcaatagtgcaaccgcctgtatttttgcggctgaagtcgccatcaaggagagtgagcgttttaatggcattcccgcgctttcagtgcgtgttgccgagccgattcgccatgcagaagcgttgatgcaacaagcgcttaccctcaagcgtagcgatgagacgcgtaccgtacagcaagatacgcaaccggtgaaaagtgtcaaaacggagctgaaacaggcactgttgagcggaatctcttttgccgtaccgttgattgtcgcggggggcacggtgctggcggtcgcggtattactgtcgcaaatcttcgggctacaagatctgtttaatgaagaaaactcctggctgtggatgtaccgcaagctgggcggcgggctgctcggaattttgatggtaccggtgctcgcggcctataccgcctattctctggcagataaaccggcgttagcgccaggctttgcggctggacttgccgccaacatgatcggctccgggtttctcggcgcggtcgttggcggattgatagccggttacttgatgcgctgggtgaaaaatcacttgcgtcttagcagtaaattcaatggattcctgactttttatctctacccggtgctcggtacgttgggagcgggcagtctgatgctgtttgtggtgggagaacctgtcgcctggatcaataactcgcttaccgcctggctgaacggtctgtcaggaagtaacgcgctgttgctgggtgccattctcggttttatgtgttcctttgaccttggagggccagtgaacaaagccgcttatgcattctgcctgggcgcaatggcgaacggcgtttacggcccgtatgccattttcgcctccgtcaaaatggtttcggcatttaccgtaaccgcttccacgatgctcgcaccgcgcctgtttaaagagtttgaaattgagaccgggaaatccacctggctgttagggctggcaggtattaccgaaggggcgatcccgatggcgattgaagatccgctgcgggttattggttcgtttgtgctgggctctatggtaacgggcgctattgtcggtgcgatgaatatcggcctttcgacacccggtgccggcattttctcgctctttttacttcatgataatggcgcgggcggtgttatggcggcaattggctggtttggtgcggcattggtgggggctgcaatctcgactgcaattctcctgatctggcggcgtcacgcggttaagcatggcaactatctgactgatggcgtaatgccataaacaaaaaggaaacgacgatgaaagcggtatctcgcgttcacatcaccccgcatatgcattgggatcgggagtggtatttcaccaccgaagagtcacgcattctgctggtcaataatatggaagagatcctgtgccgactggaacaggacaacgaatacaaatattacgtactcgacgggcaaacggcgatcctcgaagattatttcgcggtgaaaccggaaaacaaagaccgcgtgaagaaacaggtagaagccggtaagttgattatcggcccctggtatacccagaccgataccacgattgtttctgcggaatccatcgtccgtaatctgatgtacggaatgcgtgactgcctcgcgtttggcgagccgatgaaaataggttatttaccggattcctttggcatgtccgggcaactgccgcatatctacaatggatttggcattacccgcactatgttctggcgcggatgttcggagcgccacggtactgataaaaccgagtttttatggcaaagcagtgacggtagcgaagtgacggcgcaggtgctgccgttgggttatgccatcggtaagtacttacctgccgacgaaaacggattacgcaaacgcctcgacagttattttgacgtgctggaaaaagcgtctgtaaccaaagagattttattgccgaatggtcatgaccagatgccattgcagcaaaatatcttcgaagtgatggagaaacttcgcgaaatttatcctcaacgaaagtttgtgatgagccgctttgaagaggtattcgagcagatcgaagcgcagcgtgaaagtctggccaccctgaaaggtgaatttatcgatggcaaatatatgcgcgtacatcgcaccatcggttccacgcgcatggatatcaaaattgcccacgcacgtattgaaaataagattgttaatctgctggaaccgctggcaacgctggcctggacgttgggttttgaataccaccacggcttgctggagaaaatgtggaaagagatcttaaaaaatcatgcccacgacagtatcggttgttgttgcagtgacaaagttcatcgcgaaattgtcgcccgcttcgaactggctgaagacatggcggataatctgctgcgtttctacatgcgcaaaattgccgataacatgccacagagtgatgccgacaaactcgtgctgtttaacctgatgccctggccgcgggaagaagttattaacaccactgtgcggctgcgcgccagccagtttaatctacgagacgatcgcggtcagcctgtaccgtattttattcgccatgcccgtgagatcgatccaggcctaatcgatcggcaaatagttcattacggtaattacgatccctttatggagtttgatatacagatcaaccagattgtcccttctatgggctatcgcacgctttatatcgaagcgaatcagcctggcaacgtgattgcggcaaaaagtgacgctgaagggatactggaaaatgctttctggcaaattgcgctcaatgaggatggaacgctacaactggtagataaagatagcggtgtgcgctatgaccgggtgttgcaaattgaagaaagctctgatgatggtgatgaatatgactattcacccgcaaaagaagagtgggtaatgacttctgcaacagcgaaaccgcaatgcgagattactcatgaggcctggcagagcagggctgttatccgctatgacatggcggtgccgctcaatttgttggaacgaagcgtccggcaatccacgggcagagtaggggtggagatggttgtcactctgagtcataacagcagacgtattgatgtggatatcaaccttgataaccaggctgacgatcatcgccttcgcgtcctgatccctacatcttttaacaccgatagtgttctggcagatacccagtttggttcgctaacgcgccccgtgaacgacagtgcaatgaacaactggcagcaagaaggctggaaagaagcgccggttccggtatggaatatgctcaactatgcagccttacaggaagggcgtaacggcatggctgtctttagcgaagggctacgtgaatttgaagtcatcggtgaagagaagaaaacctttgccattacgttgctgcgtggcgtgggcttactgggcaaagaagatctgtttttaaggcctgggcggccttcgggaattaaaatgccagtcccggactcacaactacgtggtctgctttcttgtcgcctaagtttattgagttataccggtacgccaaccgccgctggtgtagctcagcaggcgcgagcatggctgactccagtacagtgttacaacaaaatcccatgggatgcgatgaagctcaacaaagccggattcaacgtgccggaaagttatagtttgttgaaaatgcccccagtgggatgcctgataagcgcacttaagaaagctgaagaccgacaagaagtgattttacggctgtttaatccggctgaatcagcaacctgtgatgcgactgttgctttcagtcgcgaggtgatttcttgctcagaaacgatgatggatgaacacattaccaccgaggaaaatcaaggttcaaatctatcggggccttttttacccggccagtcacggacgttcagttaccggcttgcctgaatagcaatcaaaccgaagccacatatgcgcggccagattgttgacaaagggcgctttgttcatgccggatacggcatgaacgctttattcggtctacaaaagcaggcaaattcaatatattgcagagatgatgtagacactggcaagcgtagcgcatcaggtaattttgcgtttatcttcactctcaagccacgtatatgtggctttatttttaacaaaataataaccctgggtgagttaattataatataattataagttaattaaatgttaatatcagcggggtggatttatgcctttattagtaaccctgaaactctgcgtcgtattagccagtgaccaaaaaaagaattaaggtcaaccgtgctgtttttgcttcgtctctttttatctttaattgccaaccgaaactaatttcagccttataactcacacattttaaacataaatgtcactaaagttaccttattgaaacatgattaacataatttgtaggaattgatatttatcaatgtataagtcttggaaatgggcatcaaaaagagataaattgttctcgatcaaattggctgaaaggcggtaatttagctataaattgatcaccgtcgaaaaatgcaaatttgcttcaacaaaaacctgtttattgtaaggattttgcggcgtaatatatacgtgggatcaatttgagtttttattaacatgttttgcaacctttctttacgccgtttttgtgtgcattcacatggtatgatgaaagtgttcaaacaaatttctattggggcatgcgtgtgaccctttctaacggggttcactctcggagtcttcatgcgatgagcaaggagtcatgatgttagatatagtcgaactgtcgcgcttacagtttgccttgaccgcgatgtaccacttcctttttgtgccactgacgctcggtatggcgttcctgctggccattatggaaacggtctacgtcctctccggcaaacagatttataaagatatgaccaagttctggggcaagttgtttggtatcaacttcgctctgggtgtggctaccggtctgaccatggagttccagttcgggactaactggtcttactattcccactatgtaggggatatcttcggtgcgccgctggcaatcgaaggtctgatggccttcttcctcgaatccacctttgtaggtctgttcttcttcggttgggatcgtctgggtaaagttcagcatatgtgtgtcacctggctggtggcgctcggttcaaacctgtccgcactgtggattctggttgcgaacggctggatgcaaaacccaatcgcgtccgatttcaactttgaaactatgcgtatggagatggtgagcttctccgagctggtgcttaacccggttgctcaggtgaaattcgttcacactgtagcgtctggttatgtgactggcgcgatgttcatcctcggtatcagcgcatggtatatgctgaaaggtcgtgacttcgccttcgctaaacgctcctttgctatcgctgccagcttcggtatggctgctgttctgtctgttattgttctgggtgatgaatccggctacgaaatgggcgacgtgcagaaaaccaaactggctgctattgaagccgagtgggaaacgcaacctgcgcctgctgcctttactctgttcggcattcctgatcaggaagaggagacgaacaaatttgcgattcagatcccttacgcactgggcatcattgcaacgcgttccgtggataccccggttatcggcctgaaagagctgatggtgcagcatgaagaacgcattcgtaacgggatgaaggcgtactctctgctcgaacaactgcgttctggttctaccgaccaggcggttcgtgaccagttcaatagcatgaagaaagacctcggttacggtctgctgctgaaacgctatacgccaaacgtggctgatgcgactgaagcgcagattcaacaggcaaccaaagactccatcccgcgtgtagcgccgctgtactttgcgttccgtatcatggtggcgtgtggcttcctgctgctggcaatcatcgcgctctctttctggagtgtcatccgcaaccgcattggcgagaaaaaatggcttctgcgcgccgcgctgtacggtattccgctgccgtggattgctgtagaagcgggctggttcgtggctgaatatggccgccaaccgtgggctatcggtgaagtgctgccgacagctgtggcgaactcgtcactgaccgcaggcgatctcatcttctcaatggtgctgatttgcggcctgtataccctgttcctggtggcagaattgttcttaatgttcaaatttgcacgcctcggcccaagcagcctgaaaaccggtcgctatcactttgagcagtcttccacgactactcagccggcacgctaagacaggagtcgtcaaatgatcgattatgaagtattgcgttttatctggtggctgctggttggcgttctgctgattggttttgcagtcactgacggtttcgacatgggggtgggcatgctcacccgtttcctcggtcgtaacgacaccgagcgtcgaattatgattaactccattgcaccacactgggacggtaaccaggtttggctgatcaccgcgggcggcgcactctttgctgcctggccgatggtctatgccgctgcgttctccggcttctatgtggcgatgatcctcgtgctggcgtctttgttcttccgtccggtcggttttgactaccgctccaagattgaagaaacccgctggcgtaacatgtgggactggggcatcttcattggtagcttcgttccgccgctggtaattggtgtagcgttcggtaacctgttgcagggcgtaccgttcaacgttgatgaatatctgcgtctgtactacaccggtaacttcttccagttgcttaacccgttcggcctgctggcaggcgtggtgagcgtagggatgatcattactcagggcgcaacctatctgcaaatgcgtaccgtgggcgaactgcacctgcgtacccgtgcaacggctcaggtggctgcgctggtgacactggtctgtttcgcactggctggcgtatgggtgatgtacggtatcgatggttatgtcgtgaaatcgacaatggaccattacgcagcctctaacccactgaataaagaagtggttcgtgaagctggcgcatggctggttaacttcaacaacacgccaattctgtgggctattccggcgctgggtgtggttctgccgctgctgaccatcctgactgcacgtatggataaagccgcgtgggcgtttgtgttctcctccctgacgctggcctgcatcatcctgacagccggtatcgcaatgttcccgtttgtgatgccgtccagcaccatgatgaacgcaagtctgacaatgtgggatgcaacttccagccagctgacgcttaacgtcatgacctgggttgcggtggttctggtaccgatcattctgctctacaccgcctggtgttactggaaaatgttcggtcgtatcaccaaagaagatattgaacgtaacacccactctctgtactaagtaaggagctaaaaatgtggtatttcgcatggattctgggaacgcttcttgcctgttcgtttggggtaatcaccgcgctggcgcttgaacacgtcgaatcaggcaaagccggtcaagaagacatctgatgagtaagattatcgcgactttgtatgcggtaatggacaagcgccccctgcgggcgctttccttcgtgatggcgcttctgttagcaggatgtatgttttgggacccatctcgttttgccgcgaagaccagtgaactggaaatctggcatggtttattgctgatgtgggccgtctgtgctggtgtgattcacggcgtgggctttcgtccgcagaaggttctttggcaagggattttttgcccattgcttgccgatattgttctcattgtcgggctgattttcttcttcttttaaatcagaattctctttaaaaaattatgggccgctccaggcccataaatttttacgctcccttaacttgccctcattcccaaacctcaatcgcgcgcgtatagtagcagcgtttaaaagctctaacttttgttgcattaccgggatgtaaagtgaatacaacgctgtttcgatggccggttcgcgtctactatgaagataccgatgccggtggtgtggtgtaccacgccagttacgtcgctttttatgaaagagcacgcacagagatgctgcgtcatcatcacttcagtcagcaggcgctgatggctgaacgcgttgcctttgtggtacgtaaaatgacggtggaatattacgcacctgcgcggctcgacgatatgctcgaaatacagactgaaataacatcaatgcgtggcacctctttggttttcacgcaacgtattgtcaacgccgagaatactttgctgaatgaagcagaggttctggttgtttgcgttgacccactcaaaatgaagcctcgtgcgcttcccaagtctattgtcgcggagtttaagcagtgactgacatgaatatccttgatttgttcctgaaggctagccttctggttaaacttatcatgttgattttgattggtttttcaatcgcatcttgggccattattatccagcggacccgtattcttaacgcagcggcgcgcgaagccgaagcgtttgaagataaattctggtctggaatcgaactctctcgcctctatcaagagagccaggggaaacgggataatctgactggttcggaacaaatcttttacagcgggttcaaagagtttgtgcgcctgcatcgtgccaatagccatgcgccggaagccgtagtggaaggggcgtcgcgtgctatgcgtatctccatgaaccgtgaacttgaaaatctggaaacgcacattccgttcctcggtacggttggctccatcagcccgtatattggtctgtttggtacggtctgggggatcatgcacgcctttatcgccctcggggcggtaaaacaagcaacactgcaaatggttgcgcccggtatcgcagaagcgttgattgcgactgcaattggtctgttcgccgcaattccggcggtaatggcttataaccgcctcaaccagcgcgtaaacaaactggaactgaattacgacaactttatggaagagtttaccgcgattctgcaccgccaggcgtttaccgttagcgagagcaacaaggggtaagccatggccagagcgcgtggacgaggtcgtcgcgatctcaagtccgaaatcaacattgtaccgttgctggacgtactgctggtgctgttgctgatctttatggcgacagcgcccatcatcacccagagcgtggaggtcgatctgccagacgctactgaatcacaggcggtgagcagtaacgataatccgccagtgattgttgaagtgtctggtattggtcagtacaccgtggtggttgagaaagatcgcctggagcgtttaccaccagagcaggtggtggcggaagtgtccagccgtttcaaggccaacccgaaaacggtctttctgatcggtggcgcaaaagatgtgccttacgatgaaataattaaagcactgaacttgttacatagtgcgggtgtgaaatcggttggtttaatgacgcagcctatctaaacatctgcgtttcccttgcttgaaagagagcgggtaacaggcgaacagtttttggaaaccgagagtgtcaaaggcaaccgaacaaaacgacaagctcaagcgggcgataattatttcagcagtgctgcatgtcatcttatttgcggcgctgatctggagttcgttcgatgagaatatagaagcttcagccggaggcggcggtggttcgtccatcgacgctgtcatggttgattcaggtgcggtagttgagcagtacaaacgcatgcaaagccaggaatcaagcgcgaagcgttctgatgaacagcgcaagatgaaggaacagcaggctgctgaagaactgcgtgagaaacaagcggctgaacaggaacgcctgaagcaacttgagaaagagcggttagcggctcaggagcagaaaaagcaggctgaagaagccgcaaaacaggccgagttaaagcagaagcaagctgaagaggcggcagcgaaagcggcggcagatgctaaagcgaaggccgaagcagatgctaaagctgcggaagaagcagcgaagaaagcggctgcagacgcaaagaaaaaagcagaagcagaagccgccaaagccgcagccgaagcgcagaaaaaagccgaggcagccgctgcggcactgaagaagaaagcggaagcggcagaagcagctgcagctgaagcaagaaagaaagcggcaactgaagctgctgaaaaagccaaagcagaagctgagaagaaagcggctgctgaaaaggctgcagctgataagaaagcggcagcagagaaagctgcagccgacaaaaaagcagcagaaaaagcggctgctgaaaaggcagcagctgataagaaagcagcggcagaaaaagccgccgcagacaaaaaagcggcagcggcaaaagctgcagctgaaaaagccgctgcagcaaaagcggccgcagaggcagatgatattttcggtgagctaagctctggtaagaatgcaccgaaaacggggggaggggcgaaagggaacaatgcttcgcctgccgggagtggtaatactaaaaacaatggcgcatcaggggccgatatcaataactatgccgggcagattaaatctgctatcgaaagtaagttctatgacgcatcgtcctatgcaggcaaaacctgtacgctgcgcataaaactggcacccgatggtatgttactggatatcaaacctgaaggtggcgatcccgcactttgtcaggctgcgttggcagcagctaaacttgcgaagatcccgaaaccaccaagccaggcagtatatgaagtgttcaaaaacgcgccattggacttcaaaccgtaatcgcgatgttgactgttcggacggtcaacatcaggcaccggttgccacggggttctggtagttttgtgtattttagtttgttaacattctgctaaattatcgtgggccatcggtccagataagggagatatgatgaagcaggcattacgagtagcatttggttttctcatactgtgggcatcagttctgcatgctgaagtccgcattgtgatcgacagcggtgtagattccggtcgtcctattggtgttgttcctttccagtgggcggggcctggtgcggcacctgaagatattggcggcatcgttgctgctgacttgcgtaacagcggtaaatttaatccgttagatcgcgctcgtctgccacagcagccgggtagtgcgcaggaagtacaaccagctgcatggtccgcactgggcattgacgctgtagttgtcggtcaggtcactccgaatccggatggttcttacaatgttgcttatcaacttgttgacactggcggcgcaccgggtactgtacttgctcagaactcgtacaaagtgaacaagcagtggctgcgttatgctggtcataccgccagtgatgaagtgtttgaaaaactgaccggcattaaaggtgcgttccgtacccgtattgcctacgttgttcagaccaacggcggtcagttcccgtatgaactgcgcgtatctgactatgacggttacaaccagtttgtcgttcaccgttcaccgcagccgctgatgtctccggcgtggtcaccagacggttctaaactggcttatgtgaccttcgaaagcggtcgttccgcgctggttattcagacgctggcaaatggcgctgtacgtcaggtggcttcattcccgcgtcacaacggtgcacctgcattctcgccagacggcagcaaactggcattcgccttgtcgaaaaccggtagtctgaacctgtacgtaatggatttggcttctggtcagatccgccaggtgactgatggtcgcagtaacaataccgaaccgacctggttcccggatagccagaacctggcatttacttctgaccaggccggtcgtccgcaggtttataaagtgaatatcaacggcggtgcgccacaacgtattacctgggaaggttcgcagaaccaggatgcggatgtcagcagcgacggtaaatttatggtaatggtcagctccaatggtgggcagcagcacattgccaaacaagatctggcaacgggaggcgtacaagttctgtcgtccacgttcctggatgaaacgccaagtctggcacctaacggcactatggtaatctacagctcttctcaggggatgggatccgtgctgaatttggtttctacagatgggcgtttcaaagcgcgtcttccggcaactgatggacaggtcaaattccctgcctggtcgccgtatctgtgataataattaattgaatagtaaaggaatcattgaaatgcaactgaacaaagtgctgaaagggctgatgattgctctgcctgttatggcaattgcggcatgttcttccaacaagaacgccagcaatgacggcagcgaaggcatgctgggtgccggcactggtatggatgcgaacggcggcaacggcaacatgtcttccgaagagcaggctcgtctgcaaatgcaacagctgcagcagaacaacatcgtttacttcgatctggacaagtacgatatccgttctgacttcgctcaaatgctggatgcacatgcaaacttcctgcgtagcaacccgtcttacaaagtcaccgtagaaggtcacgcggacgaacgtggtactccggaatacaacatctccctgggtgaacgtcgtgcgaacgccgttaagatgtacctgcagggtaaaggcgtttctgcagaccagatctccatcgtttcttacggtaaagaaaaacctgcagtactgggtcatgacgaagcggcatactccaaaaaccgtcgtgcggtactggtttactaagagaattgcatgagcagtaacttcagacatcaactattgagtctgtcgttactggttggtatagcggccccctgggccgcttttgctcaggcaccaatcagtagtgtcggctcaggctcggtcgaagaccgcgtcactcaacttgagcgtatttctaatgctcacagccagcttttaacccaactccagcaacaactttctgataatcaatccgatattgattccctgcgtggtcagattcaggaaaatcagtatcaactgaatcaggtcgtggagcggcaaaagcagatcctgttgcagatcgacagcctcagcagcggtggtgcagcggcgcaatcaaccagcagcgatcaaagcggtgcggcggcatcaacgacgccgacagctgatgctggtactgcgaatgctggcgcgccggtgaaaagcggcgatgcaaacacggattacaatgcagctattgcgctggtgcaggataaatcccgccaggatgacgcaatggtggcatttcagaatttcatcaaaaattaccctgattcaacttacctgccaaacgccaattattggctgggtcagttaaactacaacaagggtaaaaaagatgatgcggcgtactattttgcttcggtagtgaaaaactatccgaagtcaccaaaggctgctgatgcgatgtttaaagtcggcgtcatcatgcaggacaaaggtgacaccgcaaaagcgaaagccgtataccagcaggttatcagtaaataccctggtactgatggcgctaaacaggcacaaaaacgtctgaacgcgatgtaatgcataacacacgaccagaagtcgcattatttctggtcgtgtcgtgcgaatcataagcagttgagtgatctgcatcgaaatttttgttgcgctcaagtctgaaatcagtaatatatgccgccgttgccacgggatatcaaacaaaccgaaagcaacgaaaaagtgggtcgttagctcagttggtagagcagttgacttttaatcaattggtcgcaggttcgaatcctgcacgacccaccactaacatagttagttgtagtatccagcgtagtattgggtgattagctcagctgggagagcacctcccttacaaggagggggtcggcggttcgatcccgtcatcacccaccaccgggtcgttagctcagttggtagagcagttgacttttaatcaattggtcgcaggttcgaatcctgcacgacccaccagttttagcatcgaagacagatgttaagcgtgtaggataacgttgcgtcagcaacggcccgtagggcgagcgaagcgagtcatcctgcacgacccaccactaattacggtgggttcggtggaagtagtttgtagtatccagcgcagtatcgggtgattagctcagctgggagagcacctcccttacaaggagggggtcggcggttcgatcccgtcatcacccaccactcgggtcgttagctcagttggtagagcagttgacttttaatcaattggtcgcaggttcgaatcctgcacgacccaccaattttaacatcaaactcagatgttaagcgtgaaggataacgttgcgccagcaacggcccgtagggcaagcgaagcgagtcatcctgcacgacacaccaatcttaaagattggccccgagtagaaatctttcaggtaacacccgtatgggtcgttagctcagttggtagagcagttgacttttaatcaattggtcgcaggttcgaatcctgcacgacccaccatcctgaatgattaaagcagcataatcccgcaaggggtcgttagctcagttggtagagcagttgacttttaatcaattggtcgcaggttcgaatcctgcacgacccaccaatgtaaaaaagcgccctaaaggcgcttttttgctatctgcgatactcaaagattcgaacctgcagcaggtttgagttgagcgcagcgaaacaacggagccgctcgcggcgacggcccgaagggcgagcgaagcgagtcatcctgcacgacccaccaatgtaaaaaagcgccctaaaggcgcttttttgctattcaggcatcctcaatttcactttgtaaacctgatgacatcgtcagagcttactgtgcaagcaactctacgtcggtggaattaggcgtaattcgagtgacttttccccaccattcgactatcttgtttagcatataaaacaaattacaccgataacagcgaatattacgctaatgtcggttttaacgttaagcctgtaaaacgagatggtaagatgagcgtaatgtttgatccagacacggcgatttatcctttccccccgaagccgacgccgttaagcattgatgaaaaagcgtattaccgcgagaagataaaacgtctgctaaaagaacgtaatgcggtgatggttgcccactactataccgatcccgaaattcaacaactggcagaagaaaccggtggctgtatttctgattctctggaaatggcgcgcttcggtgcaaagcatcccgcttctactttgttagtcgctggggtgagatttatgggagaaaccgccaaaattctcagtccggaaaaaacaattctgatgccgacacttcaggctgaatgttcactggatctcggctgccctgttgaagaatttaacgcattttgcgatgcccatcccgatcgtactgtcgtcgtctacgccaacacttctgctgcggtaaaagcgcgcgcagattgggtggtaacttcaagcattgccgtcgaacttattgatcatcttgatagtttgggtgaaaaaatcatctgggcacccgacaaacatctggggcgttacgtgcaaaaacagacgggtggagacattctatgctggcagggtgcctgtattgtgcatgatgaatttaagactcaggcgttaacccgcttgcaagaagaatacccggatgctgccatactggtgcatccagaatcaccacaagctattgtcgatatggcggatgcggtcggttccaccagtcaactgatcgctgctgcgaaaacattgccacatcagcggcttatcgtggcaaccgatcggggcattttctacaaaatgcagcaggcagtgccagataaagagttactggaagcaccaaccgcaggtgagggtgcaacctgccgcagctgcgcgcattgtccgtggatggccatgaatggccttcagtccatcgcagaggcattagaacaggaaggaagcaatcacgaggttcatgttgatgaaaggctgcgagagagggcgctggtgccgctcaatcgtatgctggattttgcggctacactacgtggataacgaataataaggcgtaacgttacgctttgggggaaagatggatttttttagtgtgcagaatatcctggtacatataccaataggggcaggcggttatgatctctcatggatcgaagcggtaggcacgatcgccgggttgctgtgtattggccttgccagtctggagaagatcagcaactacttctttggcctgatcaacgtcaccttgtttggcattattttctttcagattcagctgtatgccagcctgctattacaggtgtttttctttgccgcgaatatttacggttggtatgcgtggtcgcgacaaaccagtcagaacgaggcggagttgaaaattcgctggttgccattgccgaaggcactcagctggttggcggtttgcgttgtttcgattggtctgatgacggtatttatcaatccggtgtttgcatttttgacccgcgtggcagtcatgatcatgcaagcattaggattacaggttgtgatgcctgaactgcaaccggacgctttcccgttctgggattcatgcatgatggtgttatctatcgtggcaatgattctgatgacgcgtaagtatgtggaaaactggctgttgtgggtgattattaacgtgattagcgtcgttatttttgcacttcagggcgtttacgccatgtctctggagtacatcatcctgacctttattgcgctcaacggcagccggatgtggatcaacagcgcacgtgaaagaggctcacgcgcgctgtcccattaatggtgatgatgtgaatggccagacaccccttcattcaggtggcagtctggcccatgacaaggttgatattccatctgaatggtggcgtgctcaatctgatagtgatccatcaggtagtgttggatctgatccaacaaggcatcgtgatcgtgtggcgggatcacctgcacatgcaacgtcatcaccggcttctcgcctaccatccatacatgtacatggtgcacattgcggacttccgggatttcccggcacatacgacgcttcagttcagcgatatccagcgataccggtgcaccttcaagtaattcattcacgctatctttcaacagtcgccacgcgctacgcagaaccagaagcgacaccagtatcgagagaatggggtcagcaggtgtccagccagtccagataataatcaacgcggcaataatagccccaaccgaacccagcaggtccccgagcacatgcagtgccgctgctcgtacgttgaggttttctcttcgctgccgtgatgaagtaaccagaaagaaagtatatttgccagcaacccagccacggcaattgccatcatcatgccgccctcgaccggacgcggcgtgcggaagcgttctatcgcctcccagacaatcaaaatggtaattaccacgagggctatggcattcacaaacgccgcgagcgtggtcagtcttagccaaccgaaagtgtggcgaatggtgggaggacgacgtgaaaattgcacggcgagtagggcgaaaagcagggcggcagtatcggtcaacatatgacccgcatcggccagcaatgccagagaaccagaaagaaaaccaccaacgacttctaccagcataaacccggcagtcacgccgaaagcatacaacaagcgacgagcattattatcttctggcaggtgtgaggacgtgtgtgagtgtgagtgcgccatgacgagtcatcccttaattattctcacttaactttatgacatcatactgcttttagaagtgaaaaattaaaagggagagactccgctctcccattattggctattttgcagggttactgcgtggtaccgtcggttttggtatcgacatcattattgatgccatcaccggtttgtacctttttattgatatccggacagcgaccatctttgcacatggtgttcttgtgctcttcatctttggtcattccgtcattgttcattgaagaaccatccgaatgcagcattgtgccaccagaaccggtatttaccccgttattgtcgacgttatttggcgcgacattttcacgggcgtcaggggctacctggcccgcatcagctgcggcgtttgcctggccgttattagtttgcgctccgctatcggcagccagtgcggcaccgctggcaaggcttagagtggcagtcagaaataatgtggccagttttgtcattttcataggatgctcctgttatggtcgttatgtcggataacctcttccaacagtgcatttgcaggtgaatataaggcattggtttaagatttcagccaggttatgaaacgcagcagagaatcttgaaataattaacaaacaaaggagttacagttagaaattgtaggagagatctcgtttttcgcgacaatctggcgtttttcttgctaattccaggattaatccgttcatagtgtaaaaccccgtttacacattctgacggaagatatagattggaagtattgcattcactaagataagtatggcaacactggaacagacatgaattatcagaacgacgatttacgcatcaaagaaatcaaagagttacttcctcctgtcgcattgctggaaaaattccccgctactgaaaatgccgcgaatacggttgcccatgcccgaaaagcgatccataagatcctgaaaggtaatgatgatcgcctgttggtggtgattggcccatgctcaattcatgatcctgtcgcggcaaaagagtatgccactcgcttgctggcgctgcgtgaagagctgaaagatgagctggaaatcgtaatgcgcgtctattttgaaaagccgcgtaccacggtgggctggaaagggctgattaacgatccgcatatggataatagcttccagatcaacgacggtctgcgtatagcccgtaaattgctgcttgatattaacgacagcggtctgccagcggcaggtgagtttctcgatatgatcaccccacaatatctcgctgacctgatgagctggggcgcaattggcgcacgtaccaccgaatcgcaggtgcaccgcgaactggcatcagggctttcttgtccggtcggcttcaaaaatggcaccgacggtacgattaaagtggctatcgatgccattaatgccgccggtgcgccgcactgcttcctgtccgtaacgaaatgggggcattcggcgattgtgaataccagcggtaacggcgattgccatatcattctgcgcggcggtaaagagcctaactacagcgcgaagcacgttgctgaagtgaaagaagggctgaacaaagcaggcctgccagcacaggtgatgatcgatttcagccatgctaactcgtccaaacaattcaaaaagcagatggatgtttgtgctgacgtttgccagcagattgccggtggcgaaaaggccattattggcgtgatggtggaaagccatctggtggaaggcaatcagagcctcgagagcggggagccgctggcctacggtaagagcatcaccgatgcctgcatcggctgggaagataccgatgctctgttacgtcaactggcgaatgcagtaaaagcgcgtcgcgggtaaggtttaattgtcggatgcgccgtcagagtggcgtatccgatgaatcaccacaggcctgataagtcgcgcagcgtcgcatcaggcaatgtgctccattgttagcaacaaaaaagccgactcacttgcagtcggctttctcattttaaacgaatgacgtttacttcgctttaccctggtttgcaaccgccgctgctttcgctgcgatctcgtcagcattacccagataatagcgtttcagcggtttgaaattctcgtcgaactcatacaccagcggcacgccagtcgggatattaagctcaagaatctcttcttcgctcatgttatcaagatatttcaccagcgcacgtaaagagttaccgtgtgcagcgatgatcacgcgctcaccgctcttcatacgcggcagaatggtttcattccagtaagggatcacgcggtcaatggtcagcgccaggctttccgtcagcggcagttctttttcgctcagtttcgcgtaacgcggatcgtgacccggataacgctcatcatctttagtcagttccggcggagtcactgcaaaaccacgacgccactgtttcacctgctcgtcgccatacttttcagcagtttccgctttgttcagaccctgcaacgcaccgtagtgacgttcgttcagtttccaggatttctcaacgggcagccatgcctgatccagttcgtccagcacattccacagggtatggatagcgcgtttcagcacagaggtgtaagcaaagtcaaagctgtaaccttcctctttcagcagcttacctgctgcttttgcttcgcttacgcctttctcagacagatccacgtcgtaccaaccggtgaaacggttttctttgttccactgactttcgccatgacgaaccagaaccagcttagttacagccatatacttactcctcaaatcattttttaatgataataattctcattatattgccgtgacgaagcaacagcaatgcttacgcataaccatagcgaaaatagtgtcgcagtgtaaggttgttgtgaatattgagttgcaaatatgtcggtgtttgctggtgatttgagcaatataaggataaagccctcattacgagggcttcaggtgctactcagcaataaactgatattccgtcaggctggaatactcttcgccaggacgcaggaagcagtccggttgcggccattcagggtggtttgggctgtccggcagaaactcgctttccagtgccaggccttgccagtcggcgtaaggttcagttcctcttgatggcgtgccgccgaggaagttgccggagtagaattgcagagccggagcggtggtgtagaccttcagctgcaatttttcatctgctgaccagacatgcgccgccactttcttgccatcgcctttggcctgtaacaagaatgcgtgatcgtaacctttcactttgcgctgatcgtcgtcggcaagaaactcactggcgatgattttggcgctacggaaatcaaaagacgttccggcgacagatttcagaccgtcgtgcggaatgccgccttcatcaaccggcagatattcgtccgccagaatctgcaacttgtgattgcgcacgtcagactgctcgccgtcaagattgaaatagacgtgattagtcatattcaccgggcaaggtttatcaactgtggcgcgataagtaatagagatacggttatcgtcggtcagacgatattgcaccgtcgcgccgagattacccgggaagccctgatcgccatcatctgaactcagggcaaacagcacctgacgatcgttctggttcacaatctgccagcgacgtttgtcgaacccttccgggccgccgtgcagctggttaacgccctgacttggcgaaagcgtcacggtttcaccgtcaaaggtataacggctattggcgatgcggttggcataacgaccaatagaggcccccagaaacgcagcctgatcctgatagcattccgggctggcacagccgagcagcgcctcgcggacgctgccatcggaaagcggaatacgggcggaaagtaaagtcgcaccccagtccatcagcgtgactaccatccctgcgttgttacgcaaagttaacagtcggtacggctgaccatcgggtgccagtgcgggagtttcgttcagcactgtcctgctccttgtgatggtttacaaacgtaaaaagtctctttaatacctgtttttgcttcatattgttcagcgacagcttgctgtacggcaggcaccagctcttccgggatcagcgcgacgatacagccgccaaatccgccgccggtcatgcgtacgccacctttgtcgccaatcacagctttgacgatttctaccagagtgtcaatttgcggcacggtgatttcgaaatcatcgcgcatagaggcatgagattccgccatcaactcgcccatacgtttcaggtcgccttgctccagcgcgctggcagcttcaacggtgcgggcgttttcagtcaggatatgacgcacgcgtttcgccacgattgggtccagctcatgtgcaacagcgttgaactcttcaatggtgacatcgcgcagagctggctgctggaagaaacgcgcaccggtttcgcactgttcacgacgggtgttgtattcgctgccaaccagggtacgtttgaagttactgttgatgatgacgacagccacacctttcggcatggaaactgctttagtccccagtgagcggcagtcaatcagcaaggcatgatctttcttgccgagtgcggaaattagctgatccatgatcccgcagttacagccaacaaactggttttctgcttcctgaccgttaagcgcgatttgtgcgccgtccagcggcagatgataaagctgctgcaatacggttccgaccgcgacttccagtgaagcggaagaacttaacccggcaccctgcggcacattgccgctgatcaccatgtccacgccgccgaagctgttgttacgcagttgcagatgtttcaccacgccacgaacgtagttagcccattgatagttttcatgtgcgacaatgggcgcatcgagggaaaactcgtcgagctgattttcataatcggctgccatcacgcgaactttacggtcatcgcgtggtgcacaactgatcacggtttgataatcaatcgcgcagggcagaacgaaaccgtcgttgtagtcggtgtgttcaccaatcaaattcacgcggccaggcgcctgaatggtgtgagtggcagggtagccaaatgcgttggcaaacagagattgtgttttttctttcagactcatttcttacactccggattcgcgaaaatggatatcgctgactgcgcgcaaacgctctgctgcctgttctgcggtcaggtctcgctgggtctctgccagcatttcataaccaaccataaatttacgtacggtggcggagcgcaacagaggcggataaaagtgcgcgtgcagctgccagtgttgattctcttcgccattaaatggtgcgccgtgccagcccatagagtaggggaaggaacactggaagaggttgtcataacgactggtcagctttttcaacgccagcgccaaatcgctgcgctgggcgtcggtcaaatcggtgatccgcaaaacgtgggctttgggcagcagtagcgtttcgaacggccaggcagcccagtaaggcacaacggctaaccagtgttcggtttcgacaacggtacggctaccgtctgccagctcgcgctgaacataatccaccagcattggtgatttctgttcggcaaaatattctttttgcaggcggtcttcgcgctcagcttcgttaggcaggaagctatttgcccaaatctgtccgtgcggatgcgggttagagcagcccatcgccgcacctttgttttcaaagacctgcacccacgggtacgtttttcccagctctgcggtttgctcctgccaggttttgacgatttccgtcaatgccgcaacgctcagttctggcaacgttttactgtgatccggtgaaaagcagatcacccggctggtaccgcgcgcgctctggcaacgcatcaaaggatcgttgctttctggcgcatctggcgtgtcagacatcaaggccgcaaagtcattagtgaaaacgtaagtcctggtgtaatcggggtttttatcgcctgtcacccgcacattacctgcgcagaggaagcaatctggatcgtgcgcaggtaacacctgtttggctggcgtttcctgcgccccctgccaggggcgcttagcgcggtgcggtgaaaccagaatccattgcccggtgagcgggttgtagcggcgatgtggatgatcaacgggattaaattgcgtcatggtcgttccttaatcgggatatccctgtggatggcgtgactgccagtgccaggtgtcctgcgccatttcatcgagtgtgcgcgttacgcgccagttcagttcacggtcggctttgctggcgtccgcccagtaggccggaaggtcgccctcgcgacgcggtgcaaaatgataattaaccggtttgccgcaggctttgctgaaggcattaaccacgtccagcacgctgttgcctacgccagcgccgaggttgtagatgtgtacgcctggcttgttcgccagtttttccatcgccacgacgtgaccgtccgccagatccattacgtggatgtaatcgcgtacgccagtaccatcttcggtcggataatcgttaccaaaaatcgccagcgagtcgcgacggcctacagcaacctgggcgatgtatggcatcaggttattcggaatgccttgcggatcttcgcccatatcgcccgacggatgcgcgccaaccgggttgaagtagcgcagcagggcaatgctccagtccggctgggctttttgcagatcggtgaggatctgttccaccatcagcttgcttttgccgtaagggctttgtggtgtgccggtcgggaagctttcaacgtatggaattttgggctgatcgccataaacggtggcggaggagctaaaaataaagtttttgacgttagcggcgcgcatggcgctaatcaggcgcagagtgccgttgacattgttgtcgtaatattccagcggtttttgtaccgattcgccgacggctttcagcccggcgaagtggatcacggtgtcgatagcgtgatcgtgcagtatctcggtcatcaacgcttcgttacgaatatcgccttcaacaaacgttggatgtttgccgcctaaacgctcgataacaggcagtacgctgcgcttactgttacagaggttatcaagaatgatgacatcatgaccgttttgcagtaattgcacacaggtatgacttccaatgtaaccgctaccaccggtaaccagaactctcataattcgctccattaggcttatggtatgaaataaccatagcataacaaagatgcgaaaagtgtgacatggaataaattagtggaatcgtttacacaagaatttagccgttttttatgcgcgattaagtgattataaaacagagggtttatgaatgattgcgctttttatctgaaaaaagaagcggtttcatgcctgcatgcgtcgaaccgttggccggagagggcgcttaggccgcctccggcaaggtcagcactaccgactcaatatatttttgtcagcacatagcgatagagtccaccgtccggcacgaactcaaggcgatgggtaatacaggcaggcgcatcttcagcgtggtgcgaaacaaacaacaattgcgtttcaccttcgctaatcagcacatcaacaaaacggcggataagctggcgattgagcggatcaagcccctgtagtggttcatcgagaataagcaacgtcggatgtttcaccagtgcgcggacgatcagcgccagacgctgctgtccccaggaaagactatggaacggagcgtcagccgtacgtttatcaatgccgagaatatccagccactgctgcaccagtttttgctggcgatccgaaacggcctgataaatgccaatcgaatcaaaatagccagaaagaatcacattacgcacggtagtgctgacccggtaatccagatgcaaactactgctgacgtaaccgatatgctttttgatatcccagatggtttcgccgctgccgcgacgtcggccgaaaagcgtcaaatcgttgctgtaaccttgcggatgatcgccagtaatcaggcttaataacgtcgattttcccgcaccatttggcccgacaatttgccagtgctcgccaggattcacctgccagctaaggttattaagaatggggcgatcgttataagaaaccacgccattattcagcacaatgcgcggttcgttggtgggtaaggcgtgacgtgctgaaggttcatccggctccggcagttgcacaccttcaagctgttcgctatgcgccagttgcgcgacgagtgcttgctggagcagttcctctttagcgcccgtttccgctaacgtacaatccgccagcacgccagcaaactggacaaattccgggatctcatcgaagcgattgagcaccagtaccagagtaataccggactgatgtaacgaggcgagtcgctcagccagctgctgacgtgaggcaacatccaggccatcgaacggctcatcaagaatcaacaagtcaggctccgacatcagcgcctgacacagcagggtttttcgcgtctcgccagtggaaaggtatttaaagcgtcggtcgaggagggcggtaataccgaactgctgcgccagttgcatgcaacgcggtgcatccttaacttcatcctgaatgatctcagccgtagtgcgtccggtgtcatcttcgccagggccgagcatatcggtgttattccgctgccattcgtcgctgacgagcttttgcaattgctcgaaggagagacgagtgatgtgggaaaactggctttgccgttcacctttcaaaagcggaagttcccccgccagcgcacgggccagcgccgactttccacttccattcgaaccgacaaacgcccaactatcacccgcgtttaacgttagctgaggcaattgcagcgtttttgtgtcgctaagacgaaacgtgccttgcaaaatttgcaacgatgacattttatatcccattttgtgcagcgattactgatagggatacgtgtttcataacaaattgtcaacacgcttagcatagcgtggcgataatcacgctgtcggcattaaagtaggccgtgacattctgtccttgctgaagagaagtcgcttcattaaccggcactgtggcgcacagtgtttgcccgtcgggtagcgccattaatacttcgcactgctctgcgccgcgctcaatatgactaataatacccggtaattggttgtcggcgttttgtgcgaccgcttcgtcctgagtaatgcctacccacggcgcttttagcaatatcaacacttctttgccttcatccagccccagacgtgcgccgctttgtgcggtaattgcgactttcaggcgtgtttttccgtcagccagtaagacatcaacatgctgttgaacgtcatcatgatcgcgggcggtgatggtgccgaaccactggttacgggcgctggtttgcagtgaaaaacgtgagatcgcggccagcaggctgttcagcggcagggcgtcatcgtcacttaacacatcaaaggctttttgctggatttgcgccagtaagtcatagagctgaatcagtcgctgaccatagcgggtcagtactgcgccgccgccacctttaccgcctgttgcgcgctcgaccagaatatgctcacttaactgattcatctcgttaatggcatcccaggcgcttttatagctgataccggcatctttcgctccctggctaatggaaccggaaagcgcaatgtgttttagtagcgaaatccggcgcgggtcggcgaataatttttgttggagcttaagggtgagaaggatttcggcctgcataacaatgtcctggcaaaagtcttattgtgacggaaaacgaacgccacgcaaagctgaccgcacaaaaggggagtgcttttctgtgcttagcggttagaatagtctcatgactatatctggagttgaccatgttagagttattaaaaagtctggtattcgccgtaatcatggtacctgtcgtgatggccatcatcctgggtctgatttacggtcttggtgaagtattcaacatcttttctggtgttggtaaaaaagaccagcccggacaaaatcattgattccctgaatgcccgcttagtcgggcattttctttttctcaacttcctgcttttcctgccgatattttttcttatctacctcacaaaggttagcaataactgctgggaaaattccgagttagtcgttatattgtcgcctacataacgttacattaaggggttaccaatggctcgtaaatggttgaacttgtttgccggggcggcactctctttcgctgttgctggcaatgcactggcagatgaagggaaaatcacggtgttcgccgccgcatcactgactaacgcaatgcaggacattgctacgcagtataaaaaagagaaaggcgtggatgtggtttcttctttcgcttcgtcatctactctcgcccgtcagattgaagcgggtgcgcctgcggatctgtttatttctgccgatcagaaatggatggattatgcggttgataaaaaagcgatcgatacggcttcgcgccagacactgctcggcaatagcctggtcgttgtagcaccgaaagccagcgagcagaaagatttcaccatcgacagcaaaaccaactggacttcgctgctgaatggcggtcgtctggcggttggcgatccggaacatgttcccgctggcatttatgcaaaagaagcactgcaaaaactgggcgcatgggatacgctctctccgaaactggctccggcggaagatgttcgtggcgcgctggcgttggtcgaacgcaatgaagcgccgctgggcatagtttacggttctgacgcagttgccagcaaaggggtaaaagtggtcgccaccttcccggaagattcgcataaaaaagtggaatacccggttgctgttgtggaagggcataacaatgcgacagtgaaagcattttatgattatttgaaagggccgcaggctgcggaaatctttaaacgttacggatttacaaccaagtaatgatactgaccgatccagaatggcaggcagttttattaagcctgaaagtttcttccctggctgtgctgtttagcctgccgtttgggatcttttttgcctggttactggtgcgttgcacgtttccgggcaaagctctgctcgacagcgtactgcatctaccgctggtgttaccgcccgtggtcgtcggttacttattattagtttcgatgggacggcgcgggtttatcggtgaacgtctgtatgactggtttggcattaccttcgcctttagctggcgcggcgcggttctcgctgccgccgtcatgtcgtttccgctgatggtgcgggcaattcgtctggcgctggaaggggttgatgtcaaactggaacaggccgcaagaacactgggggccgggcgctggcgcgttttctttactatcacgataccgctgaccttaccgggaattattgttggtacggtactggcttttgctcgttctctcggtgaatttggcgcaaccatcacctttgtgtcgaacattcctggtgaaacgcgaaccattccttctgccatgtataccctgattcagacccccggcggggaaagtggcgcggcgagactgtgcattatttctattgcgctggcgatgatctccctgttgatttcagaatggctggccagaatcagccgtgaacgggcggggcgctaatcatgctggaactgaatttttcccagaccttgggcaaccattgcctgaccattaatgaaacgctgcccgccaatggcatcactgctatctttggcgtctccggtgccggaaaaacttcgctgattaacgccatcagtggactgacgcgcccgcaaaaagggaggattgtcctcaatggtcgggtactaaatgatgccgaaaaaggtatctgcctgacgccagaaaagcgtcgcgttggctatgtttttcaggatgcgcggctgtttccgcattacaaagtgcgtggcaatctgcgctacggcatggcgaaaagcatggtcgatcagttcgataagctggtggcgcttttaggcattgaaccgttgcttgaccgtttaccaggcagcctgtccggaggcgaaaaacagcgcgtagcgattgggcgggctttgctgacggcaccagaattgctgttgctggatgaaccgctggcgtcactggatattccgcgtaaacgcgaactgttgccttatctgcaatgtctgacgcgggaaatcaacatcccgatgttgtatgtcagccattcgctggatgagatcctccatctggcagacagagtgatggtattggaaaacggtcaggtgaaagcctttggcgcactggaagaagtctggggtagtagcgtgatgaatccgtggctgccgaaagagcaacaaagtagcattctgaaagtgacggtgcttgagcatcatccgcattacgcgatgaccgcgctggcgctgggcgatcagcatttgtgggtcaataagctggacgaaccgctgcaagctgcgctacgtatccgcattcaggcttccgatgtttctctggttttacaaccgccgcagcaaaccagcattcgtaacgtattgcgggcaaaagttgttaatagttatgacgacaacggccaggtggaagtggagctggaagtcggcggtaaaacgctgtgggcgcgtatcagcccgtgggccagggatgaactggtgatcaaacctggcctgtggctgtacgcgcaaattaaaagtgtgtcgataaccgcctgattaaatcaggtggctataaatgaactgggcaatgctgtcggtggtgttatcaccaatcacaatgttggcgcgcgcttttaccgcgtcatcggcgttgcccatcgccacgcctgtaccagcggcctccagcatactgatatcattaaagttatcgccgaacgccacgacgttttccatcgaccagccttgcgcctcaacccatttcgtcaaacgtttacctttgctgttgccgccgcgtgcaatatcaacctgatcgtgccaggaccattcacactccagtcccagttcatgttcgacatgcttaccaaaatgctgcaattgcggcaggtcatcgtgcgtcagggcgaacttccatacggcgttaacttgttgcgccgtttcagccagagaagcgacttgtgtgaaagtcggacgctgttccggcggcagggtttgcgcccagttagacgtgcgaatgacatgcccggtcgggtgctcatagaccattgcatcatccacatacatcagaccgtgaatgtggtgttcattcagcatctcaatgagttgcagggctttattaacgggcattgggtccgcttccagcacggtttttgcatgataatcatacaaataggtgccattacagcaaatagcaggtgtatccagcgccagcgcctgataaaaaggatgaatagcgacgtgatggcgacctgtgacgatgattaattgatagcctgcttcgcgagcgcgggccagggcttctatcgatgaaggaagcagggtctttttcggggtcaataaggtgccgtctaagtcgagagcaatcacgcgtgtggtcatggcgtattccagattaaggttaagaattttcgtctgcgcgaatggtacaccgataccactatcggacaaaattctgcgttttaattcagcattcaccgccaaaagcgactaattttagctgttacagtcagttgctaaatgcaaaggagcattcatgaagcaaacagtttatatcgccagccctgagagccagcaaattcacgtctggaacctgaatcatgaaggcgcactgacgctgacacaggttgtcgatgtgccggggcaggtgcagccgatggtggtcagcccggacaaacgttatctctatgttggtgttcgccctgagtttcgcgtcctggcgtatcgtatcgccccggacgatggcgcactgacctttgccgcagagtctgcgctgccgggtagtccgacgcatatttccaccgatcaccaggggcagtttgtctttgtaggttcttacaatgcgggtaacgtgagcgtaacgcgtctggaagatggcctgccagtgggcgtcgtcgatgtggtcgaggggctggacggttgccattccgccaatatctcaccggacaaccgtacgctgtgggttccggcattaaagcaggatcgcatttgcctgtttacggtcagcgatgatggtcatctcgtggcgcaggaccctgcggaagtgaccaccgttgaaggggccggcccgcgtcatatggtattccatccaaacgaacaatatgcgtattgcgtcaatgagttaaacagctcagtggatgtctgggaactgaaagatccgcacggtaatatcgaatgtgtccagacgctggatatgatgccggaaaacttctccgacacccgttgggcggctgatattcatatcaccccggatggtcgccatttatacgcctgcgaccgtaccgccagcctgattaccgttttcagcgtttcggaagatggcagcgtgttgagtaaagaaggcttccagccaacggaaacccagccgcgcggcttcaatgttgatcacagcggcaagtatctgattgccgccgggcaaaaatctcaccacatctcggtatacgaaattgttggcgagcagggactactgcatgaaaaaggccgttatgcggtcgggcagggaccaatgtgggtggtggttaacgcacactaaccgctgatttaaccggcgcagtctctcctgcgccggtgtattaacctatctcctgtaacgcatgtctctggcgttcgacgatattggtccacaaattgtctttatcgtcagtccacaaattaatcagcaaggcaaaaaagcgttcagctgccggagaaagcacggcatctttgcggcgaataatccccaatgtccgacgtataacgggttccaccagtgggataccaataatcgaagaatagggcgcatggggcattgccagaccaggaagcgccgaaatccccagtcctgcctccactagtcctaatgacgtcgaaagatgacgcacttcgtaaaaccagtccagcttccagggcttgtcggctagctgttgttctatcaacaatcggttgccgctggaggaacgtacgccaatcattttgtaacccactaactcctgccattctacaagctgctttttggccaatggatggtcacgccgacaggccagcacgaatggctcgttgaccagtggggtaaaatcaatggatgaatttgtgacgttgttcatgtttatgccaaagtctgattcgttacacagcaccgattccatgcaattattcgtgccttgttccagaatccgcactttaatattgggatacagctcattaaatttaccgattgccagcggtaaaaaataaaatactgcggtcggaatacacgctaacgtcaccataccacgatgataagcattcatatcacgaatattaaaarccaacttactgatttagtgtatgatggtgtttttgaggtgctccagtggcttctgtttctatcagctgtccctcctgttcagctactgacggggtggtgcgtaacggcaaaagcaccgccggacatcagcgctatctctgctctcactgccgtaaaacatggcaactgcagttcacttacaccgcttctcaacccggtacgcaccagaaaatcattgatatggccatgaatggcgttggatgccgggcaactgcccgcattatgggcgttggcctcaacacgattttacgtcacttaaaaactcaggccgcagtcggtaacctcgcgcatacagccgggcagtgacgtcatcgtctgcgcggaaatggacgaacagtggggctatgtcggggctaaatcgcgccagcgctggctgttttacgcgtatgacaggctccggaagacggttgttgcgcacgtattcggtgaacgcactatggcgacgctggggcgtcttatgagcctgctgtcaccctttgacgtggtgatatggatgacggatggctggccgctgtatgaatcccgcctgaagggaaagctgcacgtwatcagcaagcgttacactcagcgcattgagcggcataacctgaatctgaggcagcacctggcacggctgggacggaagtcgctgtcgttctcaaaatcggtggagctgcatgacaaagtcatcgggcattatctgaacataaaacactatcaataagttggagtcattacccgttcatcgaagctgatgtgcaaacgccaaatggtgttgtcgagtacgagggtagtgccagaattgacggcgtaccgggtactgccgcaccggttgcgctcactttcctgaatgccgctggaaccaaaaccggaaaagttttcccgactgataatcagattgattattttgacgatgtcccggtgacctgtatcgatatggcgatgccagtcgtcattattccggctgaatatctgggaaaaacaggttatgaattaccggcggaactggatgccgacaaagcattattagcccgcattgaatctatccgtctacaagcgggtaaagcaatgggcttaggtgatgtcagtaatatggttatccctaaacctgtgcttatttctccagcgcagaaaggcggggcaattaatgtgcgttattttatgccgcattcttgccatcgcgcgctggcgataaccggtgctattgctatttccagtagttgtgcattggaaggcaccgtcacccgacaaatcgtcccttctgtaggatacggcaatatcaatattgaacaccccagtggtgcgctcgatgttcatttaagtaatgaaggtcaggatgccacgacgttacgcgcatctgttattcggacgaccagaaaaatattttccggtgaagtttatcttccctgaaaaaattcgttgtcaggataaggacaatcaataaaggacttctgtatgagtcatacagaaagaacaggattttaaatgaataagaaatcgttatggaagctaattctgatattagcgatcccatgtattattggttttatgccagctccggcaggattaagcgaactggcgtgggtgctttttggtatttacctggcggccattgtggggctggttatcaagcctttcccggaacctgtcgtactgttaattgccgttgctgcctccatggtggtggtcggtaacttatccgacggtgcgtttaagaccaccgccgtattaagcggttactcttcaggtactacctggctggtgttctcggcgtttaccttaagcgccgcatttgtgaccaccggtttaggtaaacgtattgcctatctgctgattggtaaaatcggtaacaccacgctgggtctgggttacgttacggtattcctcgatctggtactggctccggcaacaccgtctaacaccgcgcgtgcgggcggcattgtgttaccgatcatcaacagcgtggcggtggctttggggtccgaaccggaaaaaagtccgcgtcgtgtcggacattacctgatgatgtccatttacatggtcaccaaaaccaccagctatatgttctttaccgcaatggcggggaacattctggcgctgaaaatgatcaacgacattctgcacctgcaaattagctggggtggatgggcactggccgccggattgccgggcatcattatgctgctggtcaccccactggtgatttataccatgtatccgccagaaattaagaaggtggataataaaaccatcgctaaagcgggccttgccgaactgggaccgatgaaaatccgcgaaaaaatgctgctcggtgtctttgtgctggcgctgctgggctggattttcagtaagtctctgggggttgatgaatccaccgtggcaatcgttgttatggcgaccatgctgctgctgggtatcgttacctgggaagacgtggttaaaaataaaggcggctggaataccttaatctggtacggcggtattatcggattaagctccttattatcgaaagttaaattcttcgaatggttagctgaagtctttaaaaataacctggcatttgatggtcacggtaacgttgctttcttcgttattattttcctcagcattatcgtgcgttatttcttcgcttccggtagtgcctatatcgttgctatgttaccggtatttgccatgctggcgaacgtctccggcgcaccgttaatgttaaccgcgctggcactgttgttctccaactcctatggcggcatggttactcactatggcggcgcggcaggtccggtcatctttggcgtgggttacaacgatattaaatcctggtggttggtcggtgcggtactgacgatattaaccttcctggtgcatatcaccctcggcgtgtggtggtggaatatgctgatcggctggaacatgctgtaaatatactcgtcatacttcaagttgcatgtgctgcgtttgcgttcgctcaccccagtcacttacttatgtaagctcctggggattcactcacttgtcgccttcctgcaactcgaattatttagagtatatccatttattatctttctgcgcacttcacggtgcgcagatatctggagcatttgatgatcaagttatctgaaaaaggcgtgtttctcgccagtaataacgaaataattgccgaagaacatttcaccggcgaaattaaaaaagaagaagccaaaaaaggcactattgcctggtctattctctcttctcataatacgtccggaaatatggataaacttaaaattaagtttgattcattagcctctcacgatattacctttgttggtattgtacagaccgctaaagcgtccggaatggaacgtttcccgctgccgtatgtgctgaccaactgccataactcactctgcgccgtcggcggcaccattaacggtgatgaccatgtttttggtttatcggcggcccagcgttatggcggtatttttgtgcctccgcacattgctgtcatccatcaatatatgcgtgagatgatggcaggcggcggcaaaatgatcctcgggtcagacagccacacccgttacggtgcattagggacaatggcagtcggtgagggtggcggtgagttggtaaaacagctgcttaatgacacctgggatatcgactatccgggcgtggttgcggtgcatctgaccggaaaacctgcgccgtatgtggggccacaggatgtggcgctggctatcattggcgcggtgttcaaaaacggttacgtcaaaaacaaagtcatggagttcgttggaccgggcgttagcgcgctctctaccgatttccgtaacagcgttgacgtgatgaccacggaaaccacctgtttaagctccgtctggcaaactgatgaagaagtgcataactggctggcgctgcacggtcgcggccaggattactgccagcttaaccctcaaccgatggcgtactacgatggctgcatcagcgttgatttaagcgccatcaaaccaatgattgcgctgccgttccacccgagcaacgtgtatgaaatcgacacactgaaccagaacctgaccgacattctgcgtgagattgaaattgagtccgaacgcgtggcgcacggtaaagccaaactctcgctgctggataaagtggaaaatggtcgcctgaaagtgcagcaggggattatcgcgggctgttctggcggtaactacgaaaacgtcatcgcggcggcgaatgcactgcgcggtcaatcctgtggcaatgacaccttctcgctggcagtttacccgtcatcacagccggtgtttatggatctcgccaaaaaaggtgtggtagcagatttgattggcgcaggggcaatcatcagaaccgcgttctgcggcccatgctttggcgcgggcgatacgccaatcaacaacggtttgagtattcgccacaccacgcgtaacttcccgaaccgcgaaggctctaagccagctaatgggcagatgtcagcggtggcgttgatggacgctcgttctatcgctgcgactgcggcaaacggtggctatttaacctctgccagcgaacttgattgctgggacaacgtgccggagtacgccttcgatgtaacgccgtataaaaaccgtgtttatcagggctttgtgaaaggggcaactcagcaaccgctgatttacggaccgaacattaaagactggccggaattgggtgcgctgactgacaatatcgtcctgaaagtgtgctcgaagatcctcgacgaagtgaccaccaccgacgaactgattccttccggtgaaacctcttcttatcgttcaaatccgattggtctggcggagtttaccctgtcacgccgcgatcccggttatgttggcagaagtaaagcgactgctgagctggaaaatcagcgtctggcggggaatgtcagcgagctgacagaggtgtttgcgcgcattaagcagattgctggtcaggagcatattgatccgctgcaaactgaaattggcagcatggtatatgcggtgaaaccaggcgatggttctgcgcgtgaacaggcggcgagctgccagcgtgtgattggcggtctggcgaatattgccgaagagtacgcgactaaacgctaccgttctaacgtcatcaactgggggatgttaccgctgcagatggcggaagtgccaacctttgaagtgggggattacatttacatccctggcattaaagcggcgctggataatccgggtacgacgtttaaaggttatgtgatccatgaagatgcgccggtaacggaaattacgctctatatggaaagtctgactgctgaagagcgcgagattatcaaggcgggtagtttgattaacttcaataaaaaccgtcagatgtaaaaagcgccatgtgaatgtaggtcgcattcggcacttattgtcggatgcgatgcttgcgcatcttatccgacctacgaatcgcatcgaatctgtaggccagataaggcattttcgcagcatccggcacttattgtcggatgcgatgcttgcgcatcttatccgacctacaaatcgcatcgaaccgtaggccggataaggcgtttacgccgcatccggcaaatagttaattgctcttacttcttcgcctctgcaaccactttactacccacgccgcggttattgtattcccacatgcggttgtagttagtgtcattcagattgcgctgtatttcgtcgttatcatctacgctgccggtattacccgcaaacggacgattagagatcaccgcatcggcccacggtttagccgtgttaaaaccttcgttgatggcgctatcacggatcaccacctgaccgttggtattggcatcaacatccagcgagcggcccagttgcgccacaccatcaccgaaagcattgaaacggctgtttacggcgaggaaaccgtagtaaatgttggacagcgtagccggtgcaaacacatacgcttcttgctgagtacgtgagttcaccacgcggaattcggtgttatcgaacaccactgcgccgcgaccagaaacgatatccacatccccttcaatgtagctgttggtcaccagcgtacgcggctgacggttggtttccagacggttctgcacaccgctgttggtgacaaagaaggtgttctgacgaccgagaatgttaacgttgttaatctgtacctggtcaccatcagtacgcagtgccaccgccggatggttacctgcatctacgctatcgcccagcgtgttttcgatggtcagattttgcagttgcaggccattgttttgtgaccagaagaccgcagagcagagaacaccgatactgtcgctgcgtttgctctggcagctatcgtacatataccacgctggtttacctggcatatatttgccgcgcgggttgacgtcgtgacgccagtcggcagggctcatgccaccatcaagggaaagcccaatcttcacatcaatcggtttttcacctgtaccgtacagagtaattccacccggagcggcagggacatataccgttccctgatactcaccaggcatcacggcaatatactggcgcttgttggtacgcttgataattgccgcatctaccgccgcctgaatcgtggtatgcgttacaccttgagtgcccgccgggccgacaacaaagtcaggttgcgcaggcagggtaatcggggaaggattccacgctgcagcacctggtgtcagggatgcaaaatagtgttgagcatcgaaattctgcgcttcttttgccgacagaatcgggcgagaagaggtaccaggcgcggtttgatcagaaggacgttgatcgggcggggttgagctacaggcggtcagcgtcacgccaaaagccaatgccagcgccagacgggaaactgaaaatgtgttcacaggttgctccgggctatgaaatagaaaaatgaatccgttgaagcctgcttttttatactaagttggcattataaaaaagcattgcttatcaatttgttgcaacgaacaggtcactatcagtcaaaataaaatcattatttgatttcaattttgtcccactccctgcctctgtcatcacgatactgtgatgccatggtgtccgacttatgcccgagaagatgttgagcaaacttatcgcttatctgcttctcatagagtcttgcagacaaactgcgcaactcgtgaaaggtaggcggatccccttcgaaggaaagacctgatgcttttcgtgcgcgcataaaataccttgatactgtgccggatgaaagcggttcgcgacgagtagatgcaattatggtttctccgccaagaatctctttgcatttatcaagtgtttccttcattgatattccgagagcatcaacatgcaatgctgttgggatggcaatttttacgcctgttttgctttgctcgacataaagatatccatctacgatatcagaccacttcatttcgcataaatcaccaactcgttgcccggtaacaacagccagttccattgcaagtctgagccaacatggtgatgattctgctgcttgataaattttcaggtattcgtcagccgtaagtcttgatctccttacctctgattttgctgcgcgagtggcagcgacagggtttgttgttatatggccttcagctattgcctctcggaatgcatcgctcagtgttgatctgattaacttggctgacgccgccttgccctcgtctatgtatccattgagcattgccgcaatttcttttgtggtgatgtcttcaagtggagcatcaggcagacccctccttattgctttaattttgctcatgtaatttatgagtgtcttctgcttgattcctctgctggccaggatttttcgtagcgatcaagccatgaatgtaacgtaacggaattatcactgttgattctcgctgtcagaggcttgtgtttgtgtcctgaaaataactcaatgttggcctgtatggcttcagtgattgcgattcgcctgtctctgcctaatccaaactctttacccgtccttgggtccctgtagcagtaatatccattgtttcttatataaaggttagggggtaaatcccggcgctcatgacttcgccttcttcccatttctgatcctcttcaaaaggctacctgttactggtcgatttaagtcaacctttaccgctgattcgtggaacagatactctcttccatccttaaccggaggagggaatatcctgcactcgcgtacccatcgacgaactgtttcaaggcttcttgggcgtcgctggcgtgcgttccactcctgaagtgtcaagtacatcgcaaagtctccgcaattacacgcaagaaaaaaccgccatcaggcggcttggtgttctttcagttcttcaattcgaatattggttacgtctgcatgtgctatctgcgcccacagcatccagtggtcatagcagtcgctgatgttctcggcttcgataactctgttgaatggttctccattccattcacctgtgactcggaagtgcatttatcatctccataaaacaaaacccgccgtagcgagttcagataaaagaaatcctcgtcagtgcgaggatgctgttcattgctgctatacacttttttgctctcaacgtaagcggtagcccattctgttgggttggtgcagttgcttttaggaaatgctatttaccccttaaatttcggctgaaagagctaaaatccatgcaaaaaatttacgcaattttgtgtattattgtgcagtaagtaatgagctattttctgcgcaaaaaatggatggtaaatttgtccgggtcaggaaaaattttatgggcgctaaacatgaaaaaagattcgtatccttatttgatttgcatgacagtttcagggctgatctttattttccttttcttctggtggcgggcagatatctacagggtcacgtttcttaatcagagtatatcccactattacattctgtttagcatgggaatagcttttctgttatctctgttttgggttaagaaggggatagtaaaacaaagaggctggaagagtctgtcagcataccttaaggtttatgcagggatgtgcatatttgctggattttttctgattataccccttacgacactaacttattttttgcctggagagacatcgtcttatgttgcaccgtatcggtatacttccggtagttcaaaaagttgttctggagctgaggtggatgaccccgaactacatgagaatattcgcatttgctatccgtatggcaattatgagtacgataatattatctatgttgaaaagaaaattaatatattaggtgcggtagtgacatatgcacagaccgcgcgtgatgatactgaatgatatagtatatagcgggcaagttttagttaatttatcgaggtaatataatttacctcgactcgtttgttctggtattaatatttcgctttacgaccgatttttatctgatgatatcatgcggttttcatatactgacttactgtcttttctccgttagcgattttctcctgctcagcgatgattttatctttggcttctagttaatttcgctcacttcgaacctctctgtttactgataagctccagatcctcctggcaacttgcacaagtccgacaaccctgaacgaccaggcgtcttcgttcatctatcggatcgccacactcacaacaatgagtggcagatatagcctggtggttcaggcggcgcatttttattgctgtgttgcgctgtaattcttcaatttctgatgctgaatcaatgatgtctgccatcttccattaatccctgaattgttggttaatacgcttgagggtgaatgcgaataataaaaaaggagcctgtagctccctgatgattttgcttttcatgttcatcgttccttaaagacgccgtttaacatgccgattgccaggcttaaatgagtcggtgtgaatcccatcagcgttaccgtttcgcggtgcttcttcagtacgctacggcaaatgtcatcgacgtttttatccggaaactgctgtctggcttttttgatttcagaattagcctgacgggcaatgctgcgaagggcgttttcctgctgaggtgtcattgaacaagtcccatgtcggcaagcataagcacacagaatatgaagcccgctgccagaaaaatgcattccgtggttgtcatacctggtctctctcatctgcttctgctttcgccaccatcatttccagcttttgtgaaagggatgcggctaacgtatgaaattcttcgtctgtttctactggtattggcacaaacctgactccattttgagcgaggctatgtgccatctcgatactcgttcttaactcaacgggagatgctttgtgcatacagctccccgtttattatttatctcctcagccagccgctgtgctttcaggggatttcggataacagaaaggccgggaaatacccagcctcgcttcgtaacggagtagacgaaagtgatcgtgcctacccggatattatcgtgaggatgcttcatcgccattgctccccaaatacaaaaccaatttcagccagtgccacgtccattttgtcgatgaactccggcaccatctcatcaaaactcgccatgtacttttcatcccgctcgaccacgacataatgcaggccttcacgcttcatgcgtgggtcgtagttggcraagtaccaggcrtcttttcgmgtcacccacatgctgaattgcacctgggccatgtaagctgattttatggcctcgaaaccaccgagccggaatttcatgaaatcccgggaggtaaacggacatttcagctcaaggccgttgccgtcactgcataaaccrtcgggagagcaggckgtgcgcatrctttcgtcgcgatagatgatcggggattcagtaacattcacgccggaagtgaattcaaacagggttctggcgtcgttctcgtactgttttccccaggccagcgccttagcattaacttccggagccacaccggtgcaaacctcagccagcagggtgtggaagtaggacattttcatgtcaggccacttctttcctgagcggggctttgctatcacgttgtgaacttctgaagcggtgatgacgccgagccgtaatttgtgccacgcatcatccccctgttcgacagctctcacgtcgatcccggtacgctgcaggataatgtccggtgtcatgctgccaccttctgctcagtggctttctgtttcaggaatccaagagctttcactgcttcggcctgtgtcagttctgacgatgcgcgaatgtcgcggcgaaatatctgggaacagagcggcaataagtcgtcatcccatgttttatccagggcgatcagcagagtgttaatctcctgcatggtttcatcgttaaccggagtgatgtcgcgttccggctgacgttctgtagtatatgcagtattttcgacaatacgctcggcttcatccttgtcatagatgccagcaaatccgaaggccaggcgagcacactgaatcatggctttgtgccgtaacatccgtttgggatgcgactgccacggtccggtgatttctctgccttcgcgggttttgaatggtgcgcggcgacattcatccatccactcggtaacgcagatcgggtgattgcgatctttgcggtaaatccggcatgtacaggactcattgtcctgctcaaagtccatgccatcaaactgctggttttcattgataatgcgggaccagccatcaacgccaaccaccggaacgatgccgttctgcttgtcagggaaggcgtaaatttctttcgtccagggattaaggccgtactggttggcgacgatcaacaatgcgatgaactgcgcatcgctggcatcacctttaaatgccgtctggcgaagagtggtgatcagttcctgtgggtcgacagaatccatgccgacacgttcagccagcttccctgccagcgttgcgagtgctgtactcatccgttttatacctctgaatcaatatcaacctggtggtgagcaatggtttcaaccatgtactggatgtgttctgccatgcgctcctgaaactcaacatcgtcatcaaacgcacgggtaatggcttttttgctggccccgtggcgttgcaaatgatcgatgcatagcgattcaaacaggtgctggggcaggcctttttccatgtcgtctgccagttctgcctctttctcttcacgggcgatctgctggtagtgacgcgcccagctctgagcctcaagacgatcctgaatgtaataagcgttcatggctgacctcctgaaaatggctgtgaaaatatcgcccgcgaaatgccaggctgattaggaaaacaggaaaggggattagtgattcaggccgttaccgcgtccgtcgagaaaaacttccacgagcaaatcacgggtataagtgcgctcgatgccgcgatgcagataaagccgtccgcgtaaattagctgatgcagtccaggtaccatctttgtgtttgaccagcattcctggcatgaccgcacctcgattaacggtctgcgttccataatgttgatgaaccataaaaactcctgcccgtaagctgggctgctgaacatatagagacttctgcgcgtattcaggcggtggatggccgccggttgtcataactaagccgcctcgttgaagcgactaaggtatgaaatgttgagttaatttcagctggtcacaccgacgttcacgcgtccgtttcacccctcgcactccccgaagcctgctgaaattcaaactgcggatctaagcggtcatcgcaacggtgaatcaggtagttgccgtatcgttgtgttgttgcgatgaacttatttaaaactatagttgttttatcgtcaacaacaaaagttgttttattggttgttttagatataactggttgtatttaggatggatttattttgtgacttgaatcgcatagcgataactgaagcgaggttatggtggtttttttaacggtgtgtgtgtgatgaggggagggcaaaagaaaacccggcacggtgaccgggattcttacgccgttaggtaaagatattattgcggtggcttaatattactacctagagcaaagataggaattagttctttactgaatgagcacaatgcccagttgataatttttaattggtactacccatgcttcctatatgtctgcggcatgctcccaataaccttaccgaagatgaacacccggttcatctcgtctttctcgatcgggtcccacggtgagtagcttttgttatcagagatgaccagcagcttatccttcatcatttgcaggcgctttacatgggctgtgtcgtcgtacagaaacgcatagataccatcaccgtcgaaagatttaactgtgatatcaacgaacagcagatcacctggttcgatcgttcctgacatgctgtcaccacgcacgttaatgatgcggatattttccgccttcctaccatcgaacatgtgacgagcatcgtcaaacgagtactcaaccgagcgtagaacttctacaaactcacggttgatgactcccggcccagcactgacttctatatcaagaacgtcaatcttgaagtatttggaatggctgacagttgattgtattggttgcactgtactgtctgacatatttccaacgccagaagataaccattctgcgcgcacacccaaagcgttcgcgatctccacgattttagttgtttgattagctttccctgtttcgattttctgaatagcagcctggctaaccccgaccaaatccccaagcgccttttgtgtaaggcctcgcgctaatctggcttctttaagtctttctgagagtgttgttttcatagtccaaatgtacaaccaaggttttatcccatcaaacgaaaatggttgttgactaaaaaacaaccatagttttaatcttgattcaaattaaccacggaggttgttatgaacccagctatcaaaacagcgatcaatatcgttggttcacaaaagaaactgggcgctgcttgcgaagtttcacagcaggccgtctataagtggcttcacaacaaagcaaaggtatcccctgaacatgtcggcagcattgttacggctactggtggagtagtgaaggcataccagattcgcccggatcttccgaagttgtttccacacaccgaaaagaacgcagcttaaatttccatttcacgctctttaacaataagcaatcaacttaacagtcaattcaaactaaaggagtcaattatgcaaccacttacataccaacagactagcggatttagcccgactgcggtgataaatcgttctcaaacaaaacaggtgccaggccacgaaaaaatccgtgatgccgtccgcgcctggtcggctgtagataatcaggatgtcgttgccacactcattgtgaatgagtatcgggagcagggcggcggcaccatcgatttccctgatgatgtcagccgtgcacgccagaagctgttccgcttcctcgataacaaattcgattctgaaaaataccgaaataacgtgcgtgaactgaccccggcaattctggcggtactaccgctggaatatcgcggttacctggttgagcaggatagcttcatggctaggttggctgaaatggaaaaggaactcagtgaggcaaaacaggctgtcattctcaacgcaccacgccaccagaaactgaaggaaattagtgaaggtattgtgtcgatgtttcgtgtggacccagatctggctggtccattgatggcgatggttactaccatgctgggggcgatatgacaggttcagaaatggcgaaagccggtctgctggaacagaaccgactttcaggtgcaaatcgtaacacactcattgcgggaggaattatggcaaacactgctgagatattcaattttccagtgccggatgcggtacaaaaggagccgcgcgtggcagatctcgatgatggttatacgcgcattgcaaatgagttgctggaagctgtgatgctggccggattaacacagcaccagcttctggtctttctggctgtcatgcgcaaaacatatggctttaataaaaaactggattgggttagcaacgagcaactttccgaattaaccgggatattgccgcacaagtgttctgctgcaaaaagtgttctggtaaagcgtgggatttttattcagagcgggcggaataccggcattaataatgtggtcagtgaatggtcaacattacccgaatcaggtaagaaaaataaagtttacctgaaagaggtaaatttacctgaatcaggtaaaaaaagtttacccacatcaggtaaaggcgtttacccgaatcaggtaaacacaaaagacaaactaacaaaagacaatataaaacctttttcgtccgagaattctggcgaatcctctgaccaaccagaaaacgatcttcctgtggtgaaaccggatgctgcaattcagagcggcagcaagtgggggacagcagaagacctgaccgccgcagagtggatgtttgacatggtgaagaccatcgcgccatcagccagaaaaccgaattttgcagggtgggctaacgatatccgcctgatgcgtgaacgtgacggacgtaaccaccgcgacatgtgtgtgctgttccgctgggcatgccaggacaacttctggtccggtaacgtgctaagtccggccaaactccgcgacaagtggacccagctcgaaatcaaccgaaacaagcaacaggctggcgtgatagccggcaaaccaaaactcgacctgacgaacactgactggatttacggggtggagctatgaaaaacatcgccgcacagatggttaactttgactgtgagcagatgcgccggatcgccaacaacatgccggaacagtacgacgaaaagccacaggtacagcaggtagcgcagatcatcaacggtgtgttcagccagttactggcaactttcccggcgagcctggctaaccgtgaccagaatgaactgaacgaaatccgccgccagtgggttctggctttccgggaaaacgggatcaccacaatggaacaggttaacgctggaatgcgcgtagcccgtcggcagaatcgaccattcctgccatcacccgggcagtttgtcgcctggtgccgggaagaagcatctgttaacgccgggctgccaaacgtcagcgagctggttgatatggtttacgagtattgccggaagcgtggcctgtatccggatgcagagtcttatccgtggaaatcgaacgcgcattactggttggttaccaacttgtaccagaacatgcgggccaatgcgctgactgacgcggaattacggcgcaaggctgccgatgaactgacctgtatgacagcgcgaattaaccgtggtgagacgatacctgaaccagtaaaacaacttcctgttatgggcggtagacctctaaatcgtgcacaggctctggcgaagatcgcagaaatcaaagctaagtttgggctgaaaggagcaagggtatgacgggcaaagaggcaattattcattacctggggactcataagaaattctgtgcgcaggacgttgccgcggtaacaggcgcaacggtaaccagcataaatcaggctgcggctaaaatggcgcgggcaggaatcctggtcgttgatggtaaggtctggcgaacggtgtattatcggttcgctaccagagaagaatgggaaggaaaggtgagcacgaatttgatttttaaggagtgtcgccagagtgccgcgatgaaacgggtattgagggtatataaaagaacatcaatgggtacacaatgatgaaacaggtgagttgagttcaaactgtagtacaattctctccagtttgaacaggaaagaatatgctatgaatccttatatttatcttggtggtgcaatacttgcagaggtcattggtacaaccttaatgaagttttcagaaggttttacacggttatggccatctgttggtacaattatttgttattgtgcatcattctggttattagctcagacgctggcttatattcctacagggattgcttatgctatctggtatatgcgtaccttcatatcgtgcaagaggtaaaggaataagtgaaatcgctggctattatcccagagtcata

SEQ ID NO: 117 - DNA, 86407 bp, Escherichia coli
  modified_base (33392)..(33393): a, c, t, g, unknown or other
  modified_base (33397)..(33397): a, c, t, g, unknown or other
  modified_base (33400)..(33400): a, c, t, g, unknown or other
  modified_base (33408)..(33408): a, c, t, g, unknown or other
  modified_base (33415)..(33415): a, c, t, g, unknown or other
ttatattcctacagggattgcttatgctatctggtatatgcgtaccttcatatcgtgcaagaggtaaaggaataagtgaaatcgctggctattatcccagagtcatatcagatgatttgttttacgctgtgcaggaaattcggttggcaccttttggtattagcaatagtagcaaaaatcctatgttgataaatctacttcgaacagttatgaagtgcgaggcttgtggtaataccatgattgttcatgcggtatctggaagtttgcatggctattatgtttgtccgatgagaagactgcatcgatgtgacaggccatcaataaagagagatttggttgattataatatcattaatgagttgctttttaattgtagtaaaatccaaccagttgaaaacaagaaagatgctaatgaaactttagagttgaaaattattgagctccagatgaaaattaataatttaattgctgcattatctgttgcgcctgaagttaccgctatagcagaaaaatcagagtattagataaggaattacgaagggcttctgtatcattaaaaactttgaagagtaaagcggtgagttcacttggtgattttcatgctattgacttaaccagtaaaaatgggcgagagctatgtcgtacacttgcctataaaacattcgaaaaaatcataatcaatacagataataaaacctgtgatatctattttatgaatggcattgtttttaaacactatcctttaatgaaaacaatatccgcccagcaggcgataagtactctcaaatatatggttgatggtgaggtttatttttgagtaataatcactttttcaaccgtgctatagtaagaaagttaggtaagtacaataaaattatctatcctgaacgaagcgtcctgagctatggttttactatagggactgccaatggatgctggcgttctcgttctagcagttcaacaatacccaatcacaaaacaattcactgataacaaactttgtgcacgtgcttggttatggcgagcaggtgatgtgatgttaactgcctgccagaacgttactccactacttcaggttgcggagcaccgcgaagccggccgctttacttctatcgagcatgaatatccccagatactcaacagagcgcgagcaatcctcgccagataaacggcacatgtaaaattccagccgtggctggatgataagtggagtcgagtgttaccatatttccgtcagaatctgttccaataaagtcactagttagaaatactgccagcattctacgatgacggaagtgctggcattttttgggtaatatgcgagtccatttcataaaatacgggtgctgtaaactggacgatataatctaaaatataccattaccagtagccttcaaatcgctatgtgccgatacggataaaattatattgattgtgcacataccttattggatattactgaggggtatttatataaggtgtaacgatgatgtggaactttgacagtgccgacttaagtgcaatagcagcaggtatttctgcgtttggcacattagccgcagcggggtcggcgcttgcaagttggtacacgtcaaaaaagcgctgcagctacaaaatagagtttacctttatgagtctttaaaggcttgcgctgagagagccaattcatcagctaaagataagcgcggatctgaatggagcgttaatgatgcagcggatatcatcaggtgcctagtacgggcgatggagatcatcaagcaggatagccagcagaaagaaggtaatcaggcattaatgttgaaacagtactttgttaatctgctaataatggaactgtacgaggaagttcataacggtgatgcggctgattctgtttttaaaagtacggaacctacacaagtacttgataacttatggagcaaatggcaggaggctatagctttttttgatatttggaattacccagttgcgactgaggaagacttggcagactaattttcagcacatttgatttccaataatcaaccagccataatcatgccattggagcctgaacaactccggtgacttctgcgctaaacggggacgtttatgcgcacatacaaaccaacctatcttctccattcacagatgcagaaatgcacctgcgatatattgtatccagcgtttgacctctgcggaggtgaagcgtgaatctcccacaagatggcatcaaattacatcgcggtaacttcaccgctatcggtcggcagatccagccttatctggaggagggcaaatgctttcgcatggtgcttaaaccgtggcgtgagaaacgcagtctttcccagaatgcactcagccacatgtggtacagcgaaatcagtgaatacctcatcagcaggggtaaaacgttcgctactccagcttgggtaaaagatgctctcaaacacacatatctcggttatgaaaccaaagacctggttgatgtcgtaaccggtgatatcaccactatccagtcgttacgccatacctccgatcttgataccggagagatgtatgtcttcctgtgtaaggttgaagcctgggcggtgaatattggctgccacctgactattccgcagagctgcgagttccagctgctccgcgacaagcaggaggcgtaatggctacaccgcttattcgtgtcatgaacggacacatctacagagtaccagatcgtcgtaagcgtaaaccggagctgaagccttccgaaataccaacactgctcggatataccgccagcctggttgataaaaaatggttgcgactggcagcaaggaggaatcatggctgatttgagaaaagcagcgcgtagtcgggaatgccaggtaagaatccctggcgtatgtaatggcaaccctgaaacgtctgtactggcacatatccggctgactggattgtgcggcaccggtaccaaaccgccagacctgattgccaccattgcatgttctgcctgccacgacgaaatcgaccgccgcacacattttgtcgatgctgcatatgcaaaagaatgcgcgctggaaggtatggcgagaacacaggttatctggctgaaagagggggttattaaggcgtgaatacctacagcatcacattaccctggcctccgagcaataatcgctattaccgccataatcgcgggcgcacgcacgtcagcgcgaggggcaggcataccgcgataacgtcgcccgaatcattaaaaacgcaatgctggatatcggcctggctatgcctgtgaaaatccgcattgagtgccacatgccggatcgccgtcgccgtgacctggataatctgcaaaaagccgcttttgacgcactcactaaagcaggtttctggctggatgatgctcaggtcgttgattaccgcgttgtgaagatgcctgttaccaaaggtgggaggctggaactgaccatcaccgaaatggggaatgaatgatgtttgagttttatatggcagaacgtcttcgccaccgctgggggcgtctgcgcttatatcgtttccccggttctgttttgaccgattaccgaatactgaagaattacgccaaaaccctgacaggagcaggagtatgaagtcagagataacaatcaactaatactgtttcgttgatttttgcttgtaattggcgttctggtctgatttttgtggagtaagttgatgcgtgatattcagatggttcttgagcgttggggagcgtgggcggctaataatcatgaagatgtgacctggtcgtccattgccgccggttttaagggattaattacttcaaaagtaaaatctcgcccgcaatgttgtgacgatgacgcgatgatcatttgcgggtgcatggcccgtctgaaaaagaacaacagcgatttgcacgatttattagtagattattatgtagtcggtatgacattcatgtcactggcaggtaagcattgctgctctgatggttatatcgggaaaaggttacagaaggctgagggcataattgaagggatgttaatggcattagatatccggttagagatggatatcgttgttaataactctaattaatacgccaattatttactaaaagttattaaaaatggggcgttgaaacgcccccaaaaataaagggtaatatataacagaaggtttgtatagttagaagcaaggttgtgcttctaaaggaagtggcttgagggagccacttatatgttggggaggcaaagcctcccacaacatatcttttagtaatcaaattagaactggtaaaccatacctacagcaacgatatcatcggtagcaacgccagatgctttcgtgaaatcgctcttatcaatcaggttgattttgtagtcaacaaaagtggacatatttttgttgaagtaataggttgcacctacatcaacatattcaaccaggtcctgatcaccccaaacacccaagtcttttcctttagaatgcaggtaagcaacggatggacgcaggccgaagtcgaactgatattgtgcaacagcttcgaagttttgtgctttgttggcaatatggttattaccaaaaacagtcatgttctgggtttcagaataggtggtggccagatagatgttgttcgcatcatatttcagaccagctgcccatacttcagcattttgaccagaagcattcagaccgttgttaccgtagataacctgattattagtgcgatcagatttagcataggttgcacccacgccgaatccttcatactcataagtagttgagaaaccgaaaccatcgccattagcttcagttacttcatttcggtcatttttgccctgatactgagctgcaaagttcaggccatcaaccagaccaaagaagtcgttgttacgataagttgcaacacctgtggtgcgaccagtcatgaatacatctgtttgggtccaggtatcgccaccgaattctggcagaacgtcagtccacgcaccgatgtcgtatgctacaccgtagttacggccgtaatcgattgagccgtagtcaccgaatttcaggcctgcaaatgcaagacgggttttgtctttggaggaaccttgagattcagcgcggttgcctttgaattcatattcccactgaccgaaaccagtcagttgatcgttgatttgggtttcacctttgaagccaagacgggcataagtagtatcaccatcatctgcatcattagaggagaagtagtgcttagcattaactttcccgtacagatccagcttgttactgtctttattataaatttcagctgcctgagcagacatcgccatcagtactgatgcagctacagcagaaattgccactgttaattttttcatcgtgagccctttttttgaactattattaaaaaatgatgtcactgcgcgataaatattcatctaatcaatgtgattatttcaagatgtaagttttagtttctcatttaatttgtgaagtagatctctatttttatctgaactttttctatcgaaacctatttatggctcttatttgaacaaaaataaacctattagctaatttatattaatggctgttatttatgggggttctataattcggcagtttaatttaaatcaactaaaaataacctctgaaattatttattggttatttgttgaggttttcttatgtatttgtggtggtgttttgaacactcggtagcattctcataaatatcattcagtggtttacgtacgtaaaaaattggttatgctgttaagagtggttacttcgtcacacagcttaaacccgccgtcgagctggtttttccattttttgagtctcgatattagctgataacttaatacctgagttattcactgactccgagtctgttacgtttctgcttttttgcgatacgttgtattccctcaatttacacccgctttgtctgcgaggtggggttatgaaatccatggataagttaacaacgggtgtcgcctatggcacctcagcaggtagtgccggttactggtttttacagctgctcgataaagtcacgccctcacagtgggcagcaataggtgtgctgggtagcctggtatttggcctgctgacgtacctgacaaacctttatttcaagattaaagaagataagcgcaaggctgcgagaggtgaataatgcctccatcattacgaaaagccgttgctgctgctattggtggcggagcaattgctacagcatcagtgttaatcactggcccaagtggtaacgatggtctggaaggtgtcagctacataccatacaaagatattgttggtgtatggactgtatgtcacgggcatacaggaaaagacatcatgctcggtaaaacgtataccgaagcagagtgcaaagccctcctgaataaagaccttgccactgtcgccaggcaaattaacccgtatatcgaagtcgatataccggaaacaacgcgcggcgctctttactcattcgtttacaacgtgggtgctggcaatttcagaacatcgacgcttcttcgcaaaataaaccagggcgatatcaaaggcgcatgtgatcagctacgtcgctggacatatgctggcggtaagcaatggaaagggctgatgactcgccgtgagattgagcgtgaagtctgtttgtgggggcagcaatgagcagagtaactgcgattatcttcgctctggttatctgcatcatcgtctgcctgtcatgggctgttaatcattaccgtgataacgccatgacctacaaagaacagcgcgacaaagccacatccatcatcgctgacatgcagaagcgtcaacgtgacgtagcagaactcgatgccagatatacaaaggaacttgctgatgctaacgcgactatcgaaagtctccgtgatgatgtttctgctgggcgtaagcggctgcaagtcgccgcctcctgtgcaaagtcaaagaccggagccagcagcatgggcgatggagaaagcccaagacttacagcagatgctgaactcaattattaccgtctccgaagtggaatcgacaggataaccgcgcaggttaactacctgcaggagtacatcaggacgcaatgtctgaaataatttttttgcaaatcacaaagtccatttaatgagcctcgcgatgcggggcttttttgcaataaatgcgtaccgcaacgcatgttttttttacaccgaacctgcccctttggaatgggcctttgaggataccagttagtgctggcgagcctcggtgggctggtttcctgtgcggcaaaggttcatttcaaatggtaggtaaacgttatgaatatcgtgccacttaattacaaaggtgaaattgtcagtttcaacactgatggttggatcaacgtcacaggtgttgctgagagatttgggaaacgcattgataactggatgcgtttggcagaaacgcttgaatacgttcgtgctttagacgaagcgttgaccgggaaagaatctcaaattttacatccctcacaatcgaggtatgtaaaaaccagcaaggcacgaaaggacaggggtggtggtacgtggctacatccaaaactttcagttgcatttgcccgttggtgtgatgctcgttttgctgtgtggtgcgacctgcacattgatagtctgcttcgcggtgaactgactgagcagcagaaatatgagcaagcatgtcgcattcgcgatgaccggaaatcaaaagccagcaatggggcaagagagatggctcgctggcgatgggataagccggttattgaagcaaatgttgagtactggcgcgagcaactgcagttgactctcgatatcgcgtgctgatggcaaacgcaaaactgcgttatcgaaaaaatcaaagcattactagaactgagcaacggctatccattacaaagcccatctacgggtgggcttgataatggcttataccctgcacgggataacttaactgatatcccttttaacggataaaggcattcaagcctgacacatcatgcgctgtatcgtcgccgtattcccgtattaacagagaccgtagcccgacggggaactccttctgcgcgagtgtgcgggaataatcaaaaacgatgcacaccggggttaccgggtacacatatttcatcatgccagcgagtccggttctggcacggaagaaaccggacgttatgatttagtgcggaaatatttgtgtagtgttctgaatgttctcagtaaagagtaatgaattatcaaaggtatagtaataccttttgttttcgtggatatttgtaatccatctgaaaacccctgctgtagcaagatttttcctgtattcgtaaaatgataactctcctgatttgaatccttttaaggtggcttctataaggcatttattttttgaaaatcttacatttacaaccttaccctgtccttttattaaaaccgtattatcgttttcaagaacaagatgaatattctctgtagctaaatagtaaatgtaatgtgagacattgtgacgttttagttcagaataaaaccagtgatagtttaaattatttcgcactttatcgaatatttgtttaaaaatggcaacctgagccattgtagtaccttccatgtgatatgaggggcgtagtctgcacgattatctaaattgcttcaatctggtctgatctgttttctgagcaattcagtaatgtcactcttttctttgtttgcttcaggagaaactcttttttctgagcacagtctccggcggcaggcttcaatgacccaggctgagaaattcccggaccctttttgatcaagagcgatgttaatttgttcaatcatttggttaggaaagcggatgttgcggattgttgttctgcgggttctgttcttcgttgacatgaggttgtcccgtatttagtgtygctgatttgtattrtctgaagttgyttttacgttaakttgatgcagatcaattaatatgatacctgcgtcataattgattatttgacgtggtttgatggcgtagatgcacgttgtgacatgcagatgataattattatcatttcgygggtcctttccggcgatccgacmggttacggggcggcgacctcgcgggttttcgctatttatgaaaattttccggtttaaggcgtttccgttcttcttcgtcataacttaatgtttttatttaaaataccctctgaaaagaaaggaagcgacaggtgctgaaagcgagctttttggcctctgtcgtttcctttctctgtttttgtccgtggaatgaacaatggaagtcaacaaaaagcagctggctgacattttcggtgcgagtatccgtaccattcagaactggcaggaacagggaatgcccgttctgcgaggcggtggcaagggtaatgaggtgctttatgactctgccgccgtcataaaatggtatgccgaaagggatgctgaaattgagaacgaaaagctgcgccgggaggttgaagaactgcggcaggccagcgaggcagatctccagccaggaactattgagtacgaacgccatcgacttacgcgtgcgcaggccgacgcacaggaactgaagaatgccagagactccgctgaagtggtggaaaccgcattctgtactttcgtgttgtcgcggatcgcaggtgaaattgccagtattctcgacgggctccccctgtcggtgcagcggcgttttccggaactggaaaaccgacatgttgatttcctgaaacgggatattatcaaagccatgaacaaagcagccgcgctggatgaactgataccggggttgctgagtgaatatatcgaacagtcaggttaacaggctgcggcattttgtccgcgccgggcttcgctcactgttcaggccggagccacagaccgccgttgaatgggcggatgctaattactatctcccgaaagaatccgcataccaggaagggcgctgggaaacactgccctttcagcgggccatcatgaatgcgatgggcagcgactacatccgtgaggtgaatgtggtgaagtctgcccgtatcggttattccaaaatgctgctgggtgtttatgcctactttatagagcataagcagcgcaacacccttatctggttgccgacggatggtgatgccgagaactttatgaaaacccacgttgagccgaccatccgcgatattccgtcgctgctggcgctggctccgtggtatggcaaaaagcaccgggataacacgctcactatgaagcgtttttccaatggtcgtggcttctggtgcctgggcggtaaagcggcaaaaaactaccgtgaaaagtcagtggatgtggcgggttatgatgaacttgctgcctttgatgaggatattgaacaggaaggctctccgacgttcctgggtgacaagcgtattgaaggctcggtctggccaaagtccatccgtggctccacgccaaaagtgagaggcacctgtcagattgagcgtgcagccagtgaatccccgcattttatgcgttttcatgttgcctgcccgcattgcggggaggagcagtatcttaaatttggcgacaaagagacgccgtttggcctcaaatggacgccggatgacccctccagcgtgttttatctctgcgagcataatgcctgcgtcatccgccagcaggagctggactttactgatgcccgttatatctgcgaaaagaccgggatctggacccgtgatggcattctctggttttcgtcatccggtgaagagattgagccacctgacagtgtgacctttcacatctggacagcgtacagcccgttcaccacctgggtgcagattgtcaaagactggatgaaaacgaaaggggatacgggaaaacgtaaaaccttcgtaaacaccacgctcggtgagacgtgggaggcgaaaattggcgaacgtccggatgctgaagtgatggcagagcggaaagagcattattcagcgcccgttcctgaccgtgtggcttacctgaccgccggtatcgactcccagctggaccgctacgaaatgcgcgtatggggatggggccgggtgaggaaagctggctgattgaccggcagattattatgggccgccacgacgatgaacagacgctgctgcgtgtggatgaggccatcaataaaacctatacccgccggaatggtgcagaaatgtcgatatcccgtatctgctgggatactggcgggattgacccgaccattgtgtatgaacgctcgaaaaaacatgggctgttccgggtgatccccattaaaggggcatccgtctacggaaagccggtggccagcatgccacgtaagcgaaacaaaaacggggtttaccttaccgaaatcggtacggataccgcgaaagagcagatttataaccgcttcacactgacgcaggaaggggatgaaccgcttcccggtgccgttcacttcccgaataacccggatatttttatctgaccgaagcgcagcagctgactgctgaagagcaggtcgaaaaatgggtggatggcaggaaaaaatactgtgggacagcaaaaagcgacgcaatgaggcgctcgactgcttcgtttatgcgctggcggcgctgcgcatcagtatttcccgctggcagctggatctcagtgcactgctggcgagctgcaggaagaggatggtgcagcaaccaacaagaaaacactggcagattacgcccgtgccttatccggagaggatgaatgacgcgacaggaagaacttgccgctgcccgtgcggcactgcatgacctgatgacaggaaaacgggtggcaacggtacagaaagacggacggagagtggagtttacggccacttccgtgtctgacctgaaaaaatacattgcagagctggaagtgcagaccggcatgacacagcgacgcaggggacctgcaggattttatgtatgaaaacgcccaccattcccacccttctggggccggacggcatgacatcgctgcgtgaatatgccggttatcatggcggtggcagcggatttggtgggcagttgcgggcgtggaatccaccgagtgaaagtgtggatgcagccctgctgcccaactttacccgtggcaatgcccgcgcagacgatctggtgcgcaataacggctatgccgccaacgccatccagctgcatcaggatcatatcgtcgggtcttttttccggctcagtcatcgcccaagctggcgctatctgggcatcggggaggaagaagcccgtgccttttcccgcgaggttgaagcggcatggaaagagtttgccgaggatgactgctgctgcattgacgttgagcgaaaacgcacgtttaccatgatgattcgggaaggtgtggccatgcacgcctttaacggtgaactgttcgttcaggccacctgggataccagttcgtcgcggctgttccggacacagttccggatggtcagcccgaagcgcatcagcaacccgaacaataccggcgacagccggaactgccgtgccggtgtgcagattaatgacagcggcgcggcgctgggatattacgtcagcgaggacgggtatcctggctggatgccgcagaaatggacatggataccccgtgagttacccggcgggcgcgcctcgttcattcacgtttttgaacccgtggaggacgggcagacccgcggtgcaaatgtgtttacagcgtgatggagcagatgaagatgctcgacacgctgcagaacacgcagctgcagagcgccattgtgaaggcgatgtatgccgccaccattgagagtgagctggatacgcagtcagcgatggattttattctgggcgcgaacagtcaggagcagcgggaaaggctgactggctggattggtgaaattgccgcgtattacgccgcagcaccggtccggctgggaggcgcaaaagtgccgcacctgatgccgggggactcactgaacctgcagacggctcaggacacggataacggctactccgtgtttgagcagtcactgttgcggtatattgctgccgggctgggtgtctcgtatgagcagctttcccggaattacgcccagatgagctactccacggcacgggccagtgcgaacgagtcgtgggcgtactttatggggcggcgaaaattcgtcgcatcccgtcaggcgagccagatgtttctgtgctggctggaagaggccatcgttcgccgcgtggtgacgttaccttcaaaagcgcgcttcagttttcaggaagcccgcagtgcctgggggaactgcgactggataggctccggtcgtatggccatcgatggtctgaaagaagttcaggaagcggtgatgctgatagaagccggactgagcacctacgagaaagagtgcgcgaaacgcggtgacgactatcaggaaatttttgcccagcaggtccgtgaaacgatggagcgccgcgcagccggtcttaaaccgcccgcctgggcggctgcggcatttgaatccggactgcgacaatcaacagaggaggagaagagtgacagcagagctgcgtaatctcccgcatattgccagtatggcctttaatgagccgctgatgcttgaacccgcctatgcgcgggttttcttttgtgcgcttgcaggccagcttgggatcagccgcctggcggatgcggtgtccggcgacagcctgactgccggagaggcacccgcggcgctggcgttatccgttgatgatgacggaccacgacaggcccgcagttatcaggtcatgaacggcatcgccgtgctgccggtgtccggcacgctggtcagccggacgcgggcgctgcagccgtattcggggatgaccggttacaacggcattatcgcccgtctgcaacaggctgccagcgatccgattgtggacggcattctgctggatatggacacaccgggcgggatggtggcgggagcatttgactgtgctgacatcatcgcccgtgtgcgagacataaaaccggtatgggcgctggccaacgacatgaactgcagtgcaggtcagctgcttgccagcgccgcctcccggcgtctggtcacgcagaccgcccggacaggctccatcggcgtcatgatggctcacagtaattacggtgctgcgctggagaaacagggcgtggaaatcacgctgatttacagcggcagccataaggtggatggcaacccctacagccatctaccggatgatgtccgggaaacactgcagtcccggatggatgcaacccgccggatgtttgcacagaaggtgtcggcatataccggcctgtccgtgcaggctgtgctggataccgaggctgcagtgtacagcggtcaggaggccattgatgccggactggctgatgaacttgtgaacagtaccgatgcgatcaccgtcatgcgtgatgcactggatgcacgtaaatcccgtctctcaggagggcgaatgaccaaagagactcaatcaacaactgtttcagccactgcttcgcaggctgacgttactggcgtggtgcaagcgacggagggcgagaacgccagcgctgcgcagccggacgtgaacgcgcagatcaccgcagcggttgcggcagaaaacagtcgcattatggggatcctcaactgtgaggaggctcacggacgcgaagaacaggcatgcgtgctggccgaaacccccggtatgaccgtggaaacggcccgccgtattctggccgcagcaccacagagtgcacaggcgcgcagtgacactgcgctggatcgtctgatgcagggggcaccggcaccgctggctgcaggtaacccggcatctgatgccgttaacgatttgctgaacacaccagtgtaagggatgtttatgacgagcaaagaaacctttacccattaccagccgctgggcaacagtgacccggctcataccgcaaccgcgcccggcgggttgagtgcgaaagcgcctgcaatgaccccgctgatgctggacacctccacccgtaagctggttgcgtgggatggcaccaccgacggtgctgccgttggcattcttgcagttgctgctgaccagaccagcaccacactgacgttctacaagtccggcacgttccgttatgaggatgtgctctggccggaggctgccagcgacgagacgaaaaaacggaccgcgtttgccggaacggcaatcagcatcgtttaacctgacccttcatcactaaaggccgcctgtgcggctttttttacgggatttttttatgtcgatgtacacaaccgcccagctgctggcggcaaatgagcagaaatttaagtttgatccgctgtttctgcgtctctttttccgtgagagctatcccttcaccacggagaaagtctatctctcacaaattcctggactggtaaacatggcgctgtacgtttcgccaattgtttccggtgaggttatccgttcccgtggcggctccacctctgaatttacgccgggttatgtcaagccgaagcatgaggtgaatccgcagatgaccctgcgtcgcctgccggatgaagatccgcagaatctggcggacccggcttaccgccgccgtcgcatcatcctgcagaacatgcgtgacgaagagctggccattgctcaggtcgaagagatgcaggcagtttctgccgtgctcaagggcaaatacaccatgaccggtgaagccttcgatccggttgaggtggatatgggccgcagtgcggcgaacaacatcacgcagtccggcggcacggagtggagcaagcgtgacaagtccacgtatgacccgaccgacgatatcgaagcctacgcgctgaacgccagcggcgtggtgaatatcatcgtgtttgatccgaaaggctgggcgctgttccgttccttcaaagccgtcaaggagaagctggatacccgtcgcggctctaattccgagctggagacagcggtaaaagacctgggcgaagcggtgtcctataaggggatgtatggcgatacggcgatcgtcgtgtattccggacagtacgtggaaaacgacgtcaaaaagaacttcctgccggacaacacgatggtgctggggaacactcaggcacgcggtctgcgcacctatggctgcattcaggatgcggacgcacagcgcgaaggtattaacgcctctgcccgctacccgaaaaactgggtgaccaccggcgatccggcgcgtgagttcaccatgattcagtcagcaccgctgatgctgctggctgaccctgatgcgttcgtgtccgtacaactggcgtaatcatggcccttcggggccattttctctctgtggaggagtctatgacgaaagatgaactgattgcccgtcttcaggtgctgggtgagcaactgaaccgtgatgtcagcctgacggggacgaaagaagaactggtgctccgtgtggcagagctggaagaggagcttgatgacacggatgacgctgccggtcaggacacatctgtcagcccggaaaatgcgctgaccggacatgaaaatgaggtggtatcagcgcagccggataccgtgattgatacggctgctctggtcacggtcgtggcactggtgacgctgcatactgatgcacttcacgccacgcgggatgagcctgtggcatttgtgctgccgggaacggcgtttcgtgtctctgccggtgtggcagccgaaatgacagaacatggcctggccagaatgcaataacgggaggcgctgtggctgattccgataacctgttcgatgctgccattgcccgcgccgatgaaacgatacgcgggtacatgggaacgtcagccaccatgacatccggtgagctgtccggtgctgtgatacgtggtgtttttgatgaccctgaaaatatcagctatgccggacagggggtgcgcgttgaaggctccagcccgtccctgtttgtccggactgatgatgtgcggcagctgcggcgtggagacacactgaccatcggcgaggaaaacttctgggtggaccggatttcgccggatgatggcggaagctgtcatctctggcttgggcgtggcgtgccgcctgccgttaaccgtcgccgctgaaagggggatgtatggccataaaaggtcttgagcaggccgttgaaaacctcagccgtatcagcaaaacggcggtgcctggtgccgccgcaatggccattaaccgcgttgcgtcatccgcgatatcgcagtctgcgtcacaggttgcccgtgagacaaaggtacgccggaaactggtaaaggaaagggccaggctgaaaagggccacggtcaaaaatccgcaggccagaatcagggttaaccggggggatttgcccgtaatcaagctgggtaacgcgcgggttgtcctttcccgccgcagacgtcgtaaaaaggggcagcgttcatccctgaaaggtggcggcagcgtgcttgtggtgggaaaccgtcgtattcccggcgcgtttattcagcaactgaaaaatggccggtggcatgtcatgcagcgtgtggccgggaaaaaccgttaccccattgatgtggtgaaaatcccgatggcggtgccgcttaccacggcgtttaaacagaatattgaacggatacggcgtgaacgtcttccgaaagagctgggctatgcgctgcagcatcaactgagaatggtaataaagcgatgaaacatactgaactccgtgcagccgtactggatgcactggagaagcatgacaccggggcgacgctttttgatggtcgccccgctgtttttgatgaggcggattttccggcaattgccgtttatctcaccggcgctgaatacacgggcgaagagctggacagtgatacctggcaggcggagctgcatattgaagttttcctgcctgctcaggtgccggattcagagctggattcgtggatggagtcccggatttatccggtgatgagcgatgtcccggcactgtcagatttgatcaccagtatggtggccagtggctatgactaccggcgcgacgatgatgcgggcctgtggagttcagccgatctgacttatgtcattacctatgaaatgtgaggacgatatgcctgtaccaaatccaataatgccggtgaaaggggccgggaccacactgtgggtttataaggggaacggtgacccttatgcgaacccgctttcagacgttgactggtcgcgtctggctaaagttaaagacctgacgcccggcgaactgaccgctgagtcctatgacgacagctatctcgatgatgaagatgcggactggactgcgaccgggcaggggcagaaatctgccggagataccagcttcacgctggcgtggatgcccggagagcaggggcagcaggcgctgctggcgtggtttaatgaaggggatacccgtgcctataaaatccgcttcccgaacggcacggtcgatgtgttccgcggctgggtcagcagtatcggtaaggcggtgacggcgaaggaagtgatcacccgcacggtgaaagtcaccaacgtgggacgtccgtcgatggcagaagatcgcagcacggtaacagcggcaaccggcatgaccgtgacgcctgccagcacttcggtggtgaaagggcagagcaccacgctgaccgtggcattccagccggaaggcgcaaccgacaagagtttccgtgcggtgtctgcggataaaacaaaagccaccgtgtcggtcagtggtatgaccatcaccgtgaaaggtgttgctgcaggcaaggtcaacattccggttgtatccggtaatggtgaacttgctgtggttgcagaaatcaccgtcaccgacagttaatccggagagtcagcgatgttcctgaaaaccgaatcatttgaatataacggtgtgagcgtcacgctttctgaactgtcagccctgcagcgaattgagcatctcgcccagctgaaacgacaggcagaacaggcgggatccagtctcaatcgacaggtgagcgtggaagatctcgtcagaaccggtgcttttctggtggcgatgtccctgtggcatagccatccgcagaagacaaagatgccgtccatgaatgaagccgttaaacaaattgagcaggaagtgcttaccacctggcccacagaggcaattgctcaggctgaaaatgtggtaatgcgtctgtccggtatgtctgagtttgttgtgaatgatgcacctgaacaggcagatgacgccgggccagcagagcctgtttctgcgggaaagtgttcgacggtgagctgagttttgccctgaaactggcgcgtgagatggggcgacccgactggcgcgccatgcttgccgggatgtcatccacggagtatgccgactggcaccgcttttacagtacccattattttcatgatgttctgctggatatgcacttttccgggctgacgtacaccgtactcagcctgtttttcagcgatccggatatgcatccgctggatttcagtctgctgaaccggcgcgaggctgacgaagagcctgaagatgatgtgctgatgcagaaagcggcagggcttgccggaggcgtccgctttggcccggacgggaatgaagttatccccgcttccccggatgtggcggacatgacggaggatgacgtaatgctgatgacagtatcagaagggatcgcaggaggagtccggtatggctgaaccggtaggcgatctggtcgttgatttgagtctggatgcggccagatttgacgagcagatggccagagtcaggcgtcatttttccggtacggaaagtgatgcgaaaaaaacagcggcagtcgttgaacagtcgatgaaccggcaggcgctggctgcacagaaagcgggaatttccgtcgggcagtataaagccgccatgcgtatgctgcctgcgcagttcactgacgtggccacgcagcttgcaggcgggcaaagtccgtggctgatcctgctgcaacaggggggtcaggtgaaggactccttcggcgggatgatccccatgttccgggggcttgccggtgcgatcaccctgccgatggtgggggctacctcgctggcggtggcgaccggagcgctggcgtatgcctggtatcagggcaactcaaccctgtccgatttcaacaaaacgctggtcctttccggcaatcaggcgggactgacggcagatcgtatgctggtcctgtccagagccgggcaggcggcagggctgacgtttaaccagaccagcgagtcactcagcgcactggttaaggcgggggtaagcggtgaggctcagattgcgtccatcagccagagtgtggcgcgtttctcctctgcatccggcgtggaggtggacaaggtcgctgaagccttcgggaagctgaccacagacccgacgtcggggctgacggcgatggcacgccagttccataacgtgacggcggagcagattgcgtatgttgctcagttgcagcgttccggcgatgaagccggggcattgcaggcggcgaacgaggccgcaacgaaagggtttgatgaccagacccgacgcttgaaagagaacatgggcacgctggaaacctgggcagacaggacagcacgggcattcaaatccatgtgggatgcggtgctggatattggtcgtcctgataccgcgcaggagatgctgattaaggcagaggccgcgtttaagaaagcggacgatatctggaatctgcgcaaggatgattattttgttaacgatgaagcgcgggcgcgttactgggatgatcgtgaaaaggcccgtcttgcgcttgaagctgcccgaaagaaggctgagcagcagagtcaacaggacaaaaatgcgcagcagcagagcgataccgaagcgtcacggctgaaatataccgaagaggcgcagaaggcttacgaacggctgcagacgccactggagaaatataccgcccgtcaggaagaactgaacaaggcactgaaagacgggaaaatcctgcaggcggattacaacacgctgatggcggcggcgaaaaaggattatgaagcgacgctgaaaaagccgaaacagtccggcgtgaaggtgtctgcgggcgatcgtcaggaagacagtgatcatgctgccctgctgacgcttcaggcagaactccggacgctggagaagcatgccggagcaaatgagaaaatcagccagcagcgccgggatttgtggaaggcggagagtcagttcgcggtactggaggaggcggcgcaacgtcgccagctgtctgcacaggagaaatccctgctggcgcataaagatgagacgctggagtacaaacgccagctggctgcacttggcgacaaggttacgtatcaggagcgcctgaacgcgctggcgcagcaggcggataaattcgcacagcagcaacgggcaaaacgggccgccattgatgcgaaaagccgggggctgactgaccggcaggcagaacgggaagccacggaacagcgcctgaaggaacagtatggcgataatccgctggcgctgaataacatcatgtcagagcagaaaaagacctgggcggctgaagaccagcttcgcgggaactggatggcaggcctgaagtccggctggagtgagtgggaagagagcgccacggacagtatgtcgcaggtaaaaagtgcagccacgcagacctttgatggtattgcacagaatatggcggcgatgctgaccggcagcgaacagaactggcggggattcacccgttccgtgctgtccatgatgacagaaattctgcttaagcaggcaatggtggggattgtcgggagtatcggcagagccattggcggagctgttggtggcggcgcatccgcgtcaggcggtacagccattcaggccgctgcggcgaaattccattttgcaaccggaggatttacgggaaccggcggcaaatatgagccagcggggattgttcaccgtggtgagtttgtcttcacgaaggaggcaaccagccggattggcgtggggaatctctaccggctgatgcgcggctatgccaccggtggttatgtcggtacaccgggcagcatggcagacagccggtcgcaggcgtccgggacgtttgagcagaataaccatgtggtgattaacaacgacggcacgaacgggcagataggtccggctgctctgaaggcggtgtatgacatggcccgcaagggtgcccgtgatgaaattcagacacagatgcgtgatggtggcctgttctccggaggtggacgatgaagaccttccgctggaaagtgaaacccggtatggatgtggcttcggtcccttctgtaagaaaggtgcgctttggtgatggctattctcagcgagcgcctgccgggctgaatgccaacctgaaaacgtacagcgtgacgctttctgtcccccgtgaggaggccacggtactggagtcgtttctggaagagcacgggggctggaaatcctttctgtggacgccgccttatgagtggcggcagataaaggtgacctgcgcaaaatggtcgtcgcgggtcagtatgctgcgtgttgagttcagcgcagagtttgaacaggtggtgaactgatgcaggatatccggcaggaaacactgaatgaatgcacccgtgcggagcagtcggccagcgtggtgctctgggaaatcgatctgacagaggtcggtggagaacgttattttttctgtaatgagcagaacgaaaaaggtgagccggtcacctggcaggggcgacagtatcagccgtatcccattcaggggagcggttttgaactgaatggcaaaggcaccagtacgcggcccacgctggcagtctctaacctgtacggcatgrtcaccggkatggcggaagatctgcagagtctggtcggcggaacggtggtccggcgtaaggtttacgcccgctttctggatgcggtgaacttcgtcaacggaaacagcgaagccgatccggagcaggaggtgatcagccgctggcgcatcgagcagtgcagcgaactgagcgcggtcagtgcctcttttgtactgtccacgccgactgaaacggatggcgctgtttttccgggacgtatcatgctggccaacacctgcacctggacctatcgcggcgatgagtgcggttatagcggtccggcggtcgcggatgaatatgaccagccgacgtccgatatcacgaaggataaatgcagcaaatgcctgagtggctgtaagtttcgcaataatgtcggcaactttggcagcttcctttccattaacaaactttcgcagtaaatcccatgacagagacagaatcagcgattctggcgcacgcccggcgatgtgcgccagcggagtcgtgcggcttcgtggtgagaacgccggaggaggaaagatattttccctgcgtgaatatctccggtgagccggaggagtatttccggatgtcgccggaggactggctgagtgcagaaatgcagggagagattgtggcgctggtccacagccaccccggtggtctgccctggctgagtgaggccgaccggcggctgcaggtacagagtgatttgccgtggtggctggtctgccgggtggcgattcataaattccgctgtgtgccgcatctcaccgggcggcgctttgagcacggggtaacggactgttacacgctgttccgggacgcttaccatctggcgggaattgagatgccggattttcatcgcggggataactggtggcgtcacggtcagaatctctatctggataatctggaggccacagggctgtatcaggtgccgttgtcagcggcgcagccgggcgatgtgctgctgtgctgttttggttcatcggtgccgaatcatgccgccatttactgtggtgatggcgagctgctgcaccatattcctgaacaactgagcaaacgagagaggtataccgacaaatggcagcgacgcacacactccctctggcgtcaccgggcatggcgcgcatctgcctttacggggatttgcaacgatttggccgccgcatcgaccttcgtgtgaaaacgggggctgaagccatccgcgcactggccacacagctcccggtgtttcgtcagaaactgagcgacggctggtatcaggtacggattgccgggcgggacgtcagcacgtccgggttaacggcgcagttacatgagactctgcctgatggcgctgtgattcatattgttcccagagtcgccggggccaagtcaggtggcgtattccagattgtcctgggggctgccgccattgccggatcattctttaccgccggagccacccttgcagcatggggggcagccattggggccggtggtatgaccggcatcctgttttctctcggtgccagtatggtgctcggtggtgtggcgcagatgctggcaccgaaagccagaactccccgtacacagacaacggataacggcaaacagaacacctatttctcctcactggataacatggttgcccagggcaatgttctgccggttctgtacggtgaaatgcgcgtggggtcacgcgtggtttctcaggagatcagcacggcagacgaaggggacggtggtcaggttgtggtgattggtcgctgatgcaaaatgttttatgtgaaaccgcctccgggcggttttatcgtttatggagcatgacgaatgggtaaaggcagcagtaaggggcataccccgcgcgaagcgaaagataacctgaagtccacgcagctgctgagtgtgatcgatgccatcagcgaagggccggttgaaggtccggtggacggattaaaaagcgtgctgctgaacagtacgccggtgctggacagtgaggggaataccaatatatccggcgtcacggtggtgttccgggccggtgagcaggagcagacaccgccggagggatttgaatcctccggctccgagacggtgctcggtacagaagtgaaatatgacacgccgatcacccggaccatcacgtcggcaaacatcgaccgtctgcgctttaccttcggtgtgcaggcactggtggaaaccacctcaaagggggacaggaatccatcggaagtccgcctgctggttcagatacaacgtaacggtggctgggtgacggaaaaagacatcaccattaagggtaaaaccacytcrcagtatctggcctcggtggtggtggataacctgccgccgcgcccgtttaatatccggatgcgcaggatgacgccggacagcaccacagaccagctgcagaacaaaacgctctggtcgtcatacaccgaaattatcgatgtgaaacagtgctacccgaacacggcactggtcggcgtgcaggtggactcggagcagttcggcagccagcaggtgagccgtaattatcatctgcgcgggcgtattctgcaggtgccgtcgaattataacccgcagacgcggcaatacagcggtatctgggacggaacgtttaaaccggcatacagcaacaacccggcctggtgtctgtgggatatgctgacccatccgcgctacggcatggggaaacgtcttggtgcggtggatgtggataaatgggcgctgtatcttatcggccagtactgcgaccagtcagtgccggacggctttggcggcacggagccgcgcatcacctgtaatgcctggctgaccacacagcgtaaggcgtgggatgtgctcagtgatttctgctctgcgatgcgctgtatgccggtatggaacgggcagacgctgacgttcgtgcaggaccgaccgtcggataaggtgtggacctataaccgcagtaatgtggtgatgccggatgatggtgcgccgttccgctacagcttcagcgccctgaaggaccgccataatgccgttgaggtgaactggattgacccgaataacggctgggagacggcgacagagcttgtggaggacacgcaggccattgcccgttacggtcgtaacgtcacgaagatggatgcttttggctgtaccagccgggggcaggcacaccgcgccgggctgtggctgattaaaacagaactgctggaaacgcagaccgtggacttcagcgtgggtgccgaagggcttcgccatgtaccgggcgatgtcattgaaatctgcgatgatgactatgccggtatccgcaccggcgggcgcgtgctggcggtgaacagccagacccggacgctgacgctcgaccgtgaaatcacgctgccatcctccggtaccacgctgataagcctggttgacggaagtggtaatccggtcagcgtggaggttcagtccgtcaccgacggcgtgaaggtgaaagtgagccgtgttcctgacggcgttgctgaatacagcgtrtgggggctgaagctgccgacgttgcgccagcgcctgttccgctgcgtgagtatccgtgagaacgacgacggcacgtatgccatcaccgccgtgcagcatgtaccggaaaaagaggccatcgtggataacggggcgcactttgacggcgaccagagcggcacggtaaatggtgtcacgccgccagcggtgcagcacctgaccgcagaagtcaccgcagacagcggggaataccaggtgctggcgcgctgggacacgccgaaggtggtgaagggcgtgagcttcctgcttcgcctgaccgtggcagcggatgacggccgtgagcggctggtcagcacggcccggacgacggaaaccacttaccgcttcacacaactggctctggggaactacaggctgacagtccgggcagtaaatgcgtgggggcagcagggcgatccggcgtcggtatcgttccggattgccgcaccggcagcgccgtcgcggattgagctgacgccgggctattttcagataaccgccacgccgcatcttgcggtttatgacccgacggtacagtttgagttctggttctcggaaaaacggattgcggatatcaggcaggttgaaaccagcgcgcgttatcttggtacggcactgtactggatagccgccagtatcaatatcaaaccgggccatgattattatttttacgttcgcagtgtgaacaccgttggcaaatcggcattcgtggaggctgtcggtcagccgagtgatgatgcatcaggctatctggattttttcaaaggcgagatagggaaaacccatctggctcaggagctgtggacgcagattgataacggtcagcttgcgcctgacctgactgaaatcaggacgtccataacggatgtcagcaatgaaataacacagaccgtcaataagaaactggaagaccagagtgcagcgatccagcagatacagaaggttcaggttgatacaaataataacctgaacagcatgtgggcagtgaagctgcagcagatgcaggacggacgcctttatattgcgggtatcggtgccggtattgagaacacccctgacggcatgcagagtcaggtgctgctggcagcagacaggattgcgatgattaatcctgcgaatggcaacacaaagccgatgtttgttggtcagggcgatcagatattcatgaatgaagtgttcctgaaacgcctgacggcccccaccattaccagcggcggtaatcctccggcattttccctgacatcagacgggagactgacggcgaaaaatgcggatatcagtggcagtgtgaatgcgaactcaggaacgctcaacaatgtcacgattaaccagaactgtacgattaagggcatgctggaggcgacccaggtcagaggagatttcgttaaagctgtatcaaaagccttcccgaaaaaagtcggtacgtggggtaacacggaaacaccaaacggtacggttacagtcaccatcagcgatgatcataactttgaccgccagattattattccgcccattatttttaacggtatagcgtatgacgatccggggagcggaaataacccaggaggcacgcgatacacgggttatggttttgaagttcgcaaaaacggcgtattaatcgcatccagagaaactaaaggggccattcccggtagttacagtgcagttattgatatgccgagtggcaggggaagcgtcactctggagtttaagattttccagaaaggcaatcagggggcaggcaatatcaccgactgtacggtgattgtgaccaaaaaagccgcttccggcatcagtattcgttgaaatatttataaccccaataaagggcgtcaggaatgacgccttttttattgcagaaaagcgagaggtaattatgcgtaaagtttgtgcagcaattttgtccgcagccatttgtctggccgtatccggtgcgcctgcatgggcgtctgaacatcagtccacgctgagcgcggggtatcttcatgcctcgacgaacgtccccggcagtgatgatctgaacgggattaacgtgaaataccgttatgagtttacggacacactggggctggtgacgtcattcagctatgcaggagacaagaatcgccagctgacccgttacagcgatacccgctggcatgaagattccgtgcgtaaccgctggttcagcgtaatggcggggccgtctgtgcgcgtaaatgaatggttcagcgcgtatgcgatggcgggtgtagcttacagccgtgtgtcgactttctccggggattatcttcgcgtaactgacaacaaggggaaaaagcacgatgtgctgaccggaagtgatgacggtcgccacagcaacacgtctctggcgtggggggctggcgtgcagtttaacccgaccgaatccgtggccattgatattgcttatgaaggctccggcagtggtgactggcgcactgacggtttcatcgtgggtgtcggttataaattctgattagccaggtaacacagtgttatgacagcccgccggttcaggcgggcttttttgtggggtgaatatggcagtaaagatttcaggtgtactgaaagacggcacaggaaaaccggtacagaactgcacaatccagctgaaagcaaaacgtaacagcaccacggtggtggtgaacacgctggcctcagaaaatccggatgaagccgggcgttacagcatggacgttgagtacgggcagtacagcgttattctgttggtggagggattcccgccgtcacatgccgggaccatcaccgtgtatgaagattcccgacccggtacgctgaatgattttctcggtgccatgacggaggatgatgcccgtcctgaggcactgcgccgttttgaactgatggtggaagaggtggcgcgtaacgcgtccgcggtggcacagaacacggcagccgcgaagaagtcagccagcgatgccggcacatcagcacgtgaggcggcaacccatgcgactgatgctgcaggctcagcacgcgcagccagcacatcagccgggcaggccgcgacgtcggctcagtcagcgtcttccagcgcaggaacggcatcaacaaaggctactgaagcatcaaaaagtgctgccgctgcagagtcctcaaaaagcgcggtggctaccagtgccggtgcggcgaaaacgtcagaaacgaatgcggcagcgtcacaaaaatctacagccacttctgcatccgcagcgaccacaaaggcgtcagaagctgccacctcagcccgggatgcggcggcctcaaaagaggcagcgaaatcatcagaaacgaacgcatcatcaagcgccagtagtgccgcttcctcggcaacggcggcaggaaattccgcgaaggcggcaaagacgtctgagacgaacgccaggtcttctgaaacggcagcgggacagagtgcctcagctgcggcaggctcaaaaacagcggctgcatcatctgccagtgccgcctcaacaagtgccgggcaggcctcagccagtgccaccgctgccggaaagtcggcagaaagtgccgcctcgtctgcttcaacagccacaacgaaggctggcgaagccactgaacaggccagtgcagcagcgaggtctgcttccgcagcgaagacatccgagacgaacgcgaaagcgtcggaaaccagcgcagaatcctcaaaaacggctgccgcatcgtccgccagttcggcggcttcatcggcatcatcggcgtcagcttcaaaagatgaggcgaccagacaggcgtcagcagcgaagggcagcgccacgacagcatccacgaaggcgacagaggctgctggcagtgcgacagcggcagcacagagcaaaagtacggcagaaaccgcggcaacgcgcgccgagacagcggcaaaacgggcagaggatattgcatccgccgtggcgcttgaggatgcgagcacgacgaaaaaggggatagtccagctcagtagtgcgaccaacagcacttccgagtcacaggcggcaacgccaaaagccgttaaggccgcgtatgacctggctaacgggaaatacaccgcacaggatgcaacgacagcacagaaagggataatccagttaagcagcgcgaccaacagcacgtctgaaacgctggcggcaacgccaaaggcagtaaaagcagccaatgacaatgctgagaaacgtctgcagaaagatcagaacggtgcggatatccctggcaaagacacctttacgaaaaatattggtgcctgccgtgccttcggtgggtcagtaagcacaacaacaggaaactggacgactgcacagtttatcgagtggctggattctcagggagcatttaaccatccctactggatgtgcaaggggtcctggtcttatggcaataataaaatcattactgatactgactgcggtaatattcatctcgccggagctgtcattgaagtaatggggataaagtcagcgatgacgatccgcattaccacaccgaccacctccactggtggtggaacaactaacgcccagtttacctatattaatcacggaacagattattcacctggctggcgaagggactataactccagaaataagccaacggcatcagagatcggggcgttaccgtcaggtggaacagcagtatcatcagttaatctggcttcaaaaggtcgggtaaccgcsctgacagayaataygcagggggcagcaggtctggagttatacgaggcgtataacaacggatatccaacaacgtatggaaatatcattcacctgaaagggatgacagccgttggcgaaggcgaattactcatcggctggagtggtataagcggtgctcatgctccggcatttattcgttcacgacgggatatgaccgacgcaaactggtcgccgtgggcgcagctttacacctcggctcatcctcctgmagagttttatccagtcggtgcaccgattccgtggccatcagataccgttccgtctggttatgccctgatgcaggggcagacttttgacaaatctgcttacccgaaacttgcagccgcttatccgtcaggcgtgatccctgatatgcgtggctggacgattaagggcaagcccgccagtggtcgtgccgtattgtctcaggaacaggatggcattaaatcgcatacccacagcgccagcgcatccagtacggatttggggacgaaaaccacatcatcttttgattacggcactaaatccacgaataacactggtgcacatacccatagtattagcgggacagcaaatagtgccggtgcgcaccaacacaagagttccggtgcatttggtggcacgaacacgagcatttttcctaatggttatactgcgatttcaaatctaagcgcggggattatgagcacaacaagcggtagtggccagactcgtaatgcagggaagacatcatcagatggtgctcatacccactcgctgtccggcactgctgcaagcgcaggcgcacatgcacatactgtcggtattggtgctcatacgcactccgttgcgattggctcacatggacataccatcaccgttaacgctgcgggtaacgcggaaaacaccgtcaaaaacatcgcatttaactatattgtgaggcttgcataatggcattcagaatgagtgaacaaccacggaccataaaaatttataatctgctggccggaactaatgaatttattggtgaaggtgatgcatatattccgtctcatacaggtctgccagcaaacagtaccgatattgcaccgccggatattccggcaggcttcgtggctgttttcaacagtgatgaggcatcgtggcatctcgttgaagaccatcggggtaaaacggtttatgacgtggcttccggcgacgcgttatttatttctgaactcggtccgttaccggaaaatgttacctggttgtcgccgggaggggaatatcagaagtggaacggcacagcctgggtgaaagatgcagaagcagaaaaactgttccggatccgggaggcggaagaaacaaaaaacagcctgatgcaggtagccagtgagcatattgcgccgcttcaggatgctgcagatctggaaattgcaacggaggaagaaacctcgttgctggaagcctggaagaagtatcgggtgttgctgaaccgtgttaatacaacaactgcaccggatattgaatggccaacagtacccattatcgaatagtgcattacgaactgcaggatattatatggaataatattctgcagtttattggggctgtattttaaaaaggtgtttattttgagtgagttatcaccttgttttttccggttcttttggcttgatataacgctttatcggcattgactaacatttcagatggactgagattattctcttttgaagtaaagcaaccaatactgacagttattttctcaggtccatgcgataataatttttccgagcattgctcttcaatgtttttctgattcgctctgcaattgatagcaagagcttttgagtattacctttaatgataataccgaactcctcaccgcctaagcgccctaatatatcctctttcctgatagatttttttattattctggtaaccattactatgacttgatcacccatatgatgcccccatttgtcattgatgcttttgaaattgtcaatatctaacattattactgagaaatcatggtgttttgatatattcttcaatgagtcaataaagtatcttctattgtatgtattcgttagtggatcatgaattgccatatgattagcatgatttaatttcctgaaaacataatacatgagtgttgaaatgatataaatcattgatatcaattcaagaaattttgtcatgtaccatgcaggatgggattgatcaataaaatacaataaaattagattattgcatactgacactatactaataagtattatacacaaccatattttgagtaattacgtatgctgatgcatgagctgataagtaatacaagccaaaatactgatattattttggtgtacacggtattccacgtcgacaaatgacgattcagcgagtattgtataatattaagactatattttatattgtcactgcttagattttttgctacaaacggagtaataaaaagaattaatattgacaaaacaacaattattatgttnntttnatnttctaaancactttnatttttaacattggtggaataaacagccagaaagattatagatataaagctgaactgacggaatagataatatattgcgatatcatttgatttctgatagattgtagataaatcgttacctaacggagataaagaaataatagccacttctaataaataatacgtgttgctcaaaaacgcgaatgaaagaattaagagataactttgtctctgattagaaacatagtaaagcaatagaaaaataaaaatcatcaggtttatgaaaaaaagcccaataatgaaaacactataacttatttgtgttgtttgtgttatgtatattccattattttcatgcagtaacaaaaatataatagagatgcatgaaaataaaaagatgaagatttttatttttataggtacctggttgataatcatgtacgcacctgagaatgatatatatataatatgtatcgctacaaataacgataatttcttactggtgatagtatactattattctggttaatcgctgtcaaactgatgattttggttagtattgcaatagcgaagggtttgatccggtaagactggctaggcaaggctataccaaaaaatcagtgtaggttcagaaaacgatgcaccatacaatcatcaataatttcaaattgtccattgtgcataaatcataaagaaaaccgcagcacgtcgtatgcaagaacgtgctgcggttggctggtgaactttcgatagtgcgagtattgaatgatttccagctgttgccgattttactatgttttcagtagaacacttagacaaaactgaggcacacaaatctttgcactggattgcaaggctttgtgcttctctggagtgcgacatgtttgataacaaaaattagcgcaagaagacaaaaatcaccttgcgctaatgctctgtctcaggtcactaatactatctaagtagttgattcatagtgactggatatgttgtgttttgtagcatcatgtagtctattttttagactaaatatattgtaacacattgatattaatgatttttaatgtttcacgttcagcttttttatactaacttgagcgaaacgggaaggtaaaaagacaaaaagttgtttttaatacctttaagtgataccagatggcattgcgccatctggcagagtgattaactaaacatcgcagtaatcgaggcgcttgccagagagtggaaatgaacgttaaacccgaccatcgcgccgctggcaccttcatcgacatcaatacgttctatatccagcgcgtgaacggtaaaaatgtagcgatgagtttcgcctttcggcggtgctgcgccatcgtacccggttttaccaaagtcggtacgcgtctgcaaaacgccgtctggcattgctaccagaccagagccaaacccttgcggtaatacgcgggtatcagcgggtaagttaacaactacccagtgccaccagccggagccggttggcgcatccgggtcgtagcaggtgacaacaaaacttttcgttcccgcaggaacatcatcccacgccagatgcggtgaaatattatcgccatcgtaacccatgccgttaaagacatgacgatgcggcaatttatcgccatcgcgcagatcgttactgatgagtttcatgaaccctcctttcttgtttgcagaaagtgtagccagaaaccctcacgcggacttctcgttattggcaaaaaaatgtttcatcctgtaccgcgcggttaaccgctgcggtcagacgctgcaactgttgcgggagaataatatagggcggcatcaggtaaatcagtttgccaaaaggccggatccagacaccctgttcgacaaagaatttttgcagcgccgccatattcaccggatgagtggtttcgactacgccgattgccccagcacgcgcacatcggcaaccatttcggcatcacgggcgggggcaagttgctcgcgcagctgtacttcaatagccgccacctgttgctgccagtcgccagattcgagaatcgccaggctggcgtttgctgccgcgcaggccagcggattgcccataaaagttggcccatgcataaagcaaccggcttcgccgttactgatggtttccgcaacctcgcgcgtggtgagcgtggcggaaagggtcattgtgccgccggttaaggctttaccgaggcacaaaatgtccggcgcgatttctgcatgttcacaggcaaacagtttgccggtacgaccaaatccggtggcgatctcgtcggcaatcagcaagataccttcgcgatcgcacattttgcggattcgttttaaccattccggatggtacatgcgcatcccgcctgcgccctggacaatcggttcaatgatcaccgccgcgatttcatgacgatgcgccgccatcaggcgggcaaagccaaccatatcacgttcatcccattcaccatccatgcggctttgcggggcgggagcaaacaagttttctggcagatagcctttccacaggctgtgcattgagttgtccggatcgcacaccgacatcgcgccaaaggtatcgccatgataaccattgcggaaggtcagaaaacgctggcgcgcttcgcctttggcctgccagtactgcaacgccattttcatcgccacttccaccgctacggagccggagtccgcgagaaaaacgcattccagcggttgcggcgtcattgccaccagtttgcggcatagctcgatggcgggcgcatgggtgataccgccaaacatcacatgcgacatagcatcaatttgcgacttcatcgccgcattaagctgcgggtgattatagccgtggatcgccgcccaccaggacgacataccgtcaaccaggcgtctgccgtcagacaaaattagctcgcaaccttcggcgctcgcgaccggataaaccggcagaggggaggtcatggatgtgtatgggtgccagatatggcgttggtcaaaggcaagatcgtccgttgtcataatcgacttgtaaaccaaattgaaaagatttaggtttacaagtctacaccgaattaacaacaaaaaacacgttttggagaagccccatggctcaccgcccacgctggacattgtcgcaagtcacagaattatttgaaaaaccgttgctggatctgctgtttgaagcgcagcaggtgcatcgacagcatttcgatcctcgtcaggtgcaggtcagcactttgctgtcgattaagaccggagcttgtccggaagattgcaaatactgcccgcaaagctcgcgctacaaaaccgggctggaagccgagcggttgatggaagttgaacaggtgctggagtcggcgcgcaaagcgaaagctgcgggatcgacgcgtttctgtatgggcgcggcgtggaagaatccccacgaacgcgatatgccgtacctggaacaaatggtgcagggggtaaaagcgatggggctggaggcgtgtatgacgctgggcacgttgagtgaatctcaggcgcagcgcctcgcgaacgccgggctggattactacaaccacaacctcgacacctcgccggagttttacggcaatatcatcaccacccgcacttatcaggaacgcctcgatacgttggaaaaagtgcgcgatgccgggatcaaagtctgttctggcggcattgtgggcttaggcgaaacggtaaaagatcgcgccggattattgctgcaactggcaaacctgccgacgccgccggaaagcgtgccaatcaacatgctggtgaaggtgaaaggcacgccgcttgccgataacgatgatgtcgatgcctttgattttattcgcaccattgcggtcgcgcggatcatgatgccaacctcttacgtgcgcctttctgccggacgcgagcagatgaacgaacagactcaggcgatgtgctttatggcaggcgcaaactcgattttctacggttgcaaactgctgaccacgccgaatccggaagaagataaagacctgcaactgttccgcaaactggggctaaatccgcagcaaactgccgtgctggcaggggataacgaacaacagcaacgtcttgaacaggcgctgatgaccccggacaccgacgaatattacaacgcggcagcattatgagctggcaggagaaaatcaacgcggcgctcgatgcgcggcgtgctgccgatgccctgcgtcgccgttatccagtggcgcaaggagccggacgctggctggtggcggatgatcgccagtatctgaacttttccagtaacgattatttaggtttaagccatcatccgcaaattatccgtgcctggcagcagggtgcggagcaatttggcgtcggtagcggcggttccggtcacgtcagcggttatagcgttgcgcatcaggcgctggaagaagaattggccgagtggctgggctattcgcgggcactgctatttatctctggttttgccgctaatcaggcggtcattgccgcgatgatggcaaaagaggaccgcattgtcgctgaccggcttagccatgcctcattgctggaggctgccagtttaagcccgtcgcagcttcgccgttttgttcataacgatgtcactcatctggcgcgactgcttgcttccccctgtccggggcagcaactggtggtgacagaaggcgtgttcagcatggacggcgatattgcgccactggcggaaatccagcaggtaacgcaacagcacaatggctggttgatggtcgatgatgcccacggcacgggcgttatcggggagcaggggcgcggcagctgctggctgcaaaaggtaaaaccagaattgctggtggtgacttttggcaaaggatttggcgtcagtggggctgcggtgctttgctcaagtacggtggcggattatctgctgcaattcgcccgccaccttatctacagcaccagtatgccgcccgctcaggcgcaggcattacgtgcgtcactggcggtcattcgccgtgatgagggggatgcacggcgcgaaaaactggtgtcactcattgcgcgttttcgtgccggagtacaggatttgccgtttacgctggctgattcatgcagcgccatccagccattgatcgtcggtgataacagccgtgcgttacaactggcagaaaaactgcgccagcaaggctgctgggtcacggcgattcgcccgccaaccgtacccgctggtactgcgcgactgcgcttaacgctaaccgcagcgcatgaaatgcaggatatcgaccgtctgctggaggtgctgcatggcaacggttaataaacaagccattgcagcggcatttggtcgggcagccgcactctatgagcaacacgcagatctacagcgccagagtgctgacgtcttactggcaatgctcccacagcgtaaatacacccacgtactggacgcgggttgtggacctggctggatgagccgccactggcgggaacgtcacgcgcaggtgacggccttagatctctcgccgccaatgcttgttcaggcacgccagaaggatgccgcagaccattatctggcgggagatatcgaatccctgccgttagcgactgcgacgttcgatcttgcatggagcaatctcgcagtgcagtggtgcggtaatttatccacggcactccgcgagctgtatcgggtggtgcgccccggaggcgtggtggcgtttaccacgctggtgcagggatcgttacccgaactgcatcaggcgtggcaggcggtggacgagcgtccgcatgctaatcgctttttaccgccagatgaaatcgaacagtcgctgaacggcgtgcattatcaacatcatattcagcccatcacactatggtttgatgatgcgctcagtgccatgcgttcgctgaaaggcatcggtgctacgcatcttcatgaagggcgcgacccgcgaatattaacgcgttcgcaattgcagcgattgcaactggcctggccgcaacaacaggggcgatatcctctgacgtatcatctttttttgggagtgattgctcgtgagtaaacgttattttgtcaccggaacggataccgaagtggggaaaaccgtcgccagttgtgcacttttacaagccgcgaaggcagtaggttatcggacggcaggttataaaccggtcgcctctggcagcgaaaagaccccggaaggcttacgtaatagtgacgcgctggcgttacagcacaacagcagcctgcagctggattacgcaacggtaaatccttacaccttcgcagaacccacctcgccgcacatcatcagcgcgcaagagggcaggccgatagaatcattggtaatgagcgccggattacgcgcgcttgaacaacaggctgactgggtgttagtggaaggtgctggcggctggtttacgccgctttctgacactttcacttttgcagattgggtaacacaggaacaactgccggtgatactggtagttggtgtgaaactcggctgtattaatcacgcgatgttgactgcgcaggcaatacaacacgccggactgactctggcgggttgggtggcgaacgatgttacgcctccgggaaaacgtcacgctgaatatatgaccacgctcacccgcatgattcccgcgccgctgctgggagagatcccctggcttgcagaaaatccagaaaatgcggcaaccggaaagtacataaaccttgccttgttgtagctatcctgtatttggttaaattgcgagcgagatcgcgtcttcgattgactgcaatttaaccaattaaattctaaaataatcacgaaaaaaattttacttccgcctcatgcggcgaatgtgggaattgcccaggcggcgggggataggggctggagacagttatccactattcctgtggataaccatgtgtattagagttagaaaacacgaggcaagcgagagaatacgcggcttgcacgcgaattggcgttaaagacggctcaaagaaatatcttttattttttaactggttagataaatgcaatggcagtcactgaacaggcatctcttgccataaaactgtcatcactcatcttgacaaatgttaaaaaagccgttgctttggggataacccggtaaggccggagttttatctcgccacagagtaaattttgctcatgattgacagcggagtttacgctgtaacagaaatattatggtgatgaactgtttttttatccagtataatttgttggcataattaagtacgacgagtaaaattacatacctgcccgcccaactccttcaggtagcgactcatgagtaaaccgttcaaactgaattccgcttttaaaccttctggcgatcagccagaggcgattcgacgtctcgaagaggggctggaagatggcctggcgcaccagacgttacttggcgtgactggctccgggaaaacattcaccattgccaatgtcattgctgaccttcagcgcccaaccatggtacttgcgcccaacaaaacgctggcggcccagctgtatggcgaaatgaaagagttcttcccggaaaacgcggtggaatatttcgtttcctactacgactactatcagccggaagcctatgtaccgagttccgacactttcattgagaaagatgcctcggttaacgaacatattgagcagatgcgtttgtccgccaccaaagcgatgctggagcggcgtgatgtggttgtggtggcgtctgtttccgcgatttatggtctgggcgatcctgatttatatctcaagatgatgctccatctcacggtcggtatgattatcgatcagcgcgcgattctgcgccgactggcggagctgcaatacgctcgtaatgatcaagcattccagcgtggtactttccgcgttcgtggcgaggtgatagatatcttcccggcagaatcggatgacattgcacttcgcgtggaactgtttgacgaggaagtggaacgattgtcgttatttgacccgctgaccgggcagattgtttccactattccacgttttaccatctacccgaaaacgcactacgtcacaccgcgcgagcgcatcgtacaggcgatggaggagatcaaagaagagctggccgccagacgcaaagtgctgttggaaaacaacaaactgctggaagagcagcggctgacccagcgtacccagtttgatctggagatgatgaacgagctgggctactgttcggggattgaaaactactcgcgcttcctctccggtcgtggaccgggtgagccaccgccgacgctgtttgattacctccctgccgatgggctgctggtggtcgatgaatctcatgtcaccattccacaaattggcggcatgtatcgcggtgaccgggcgcgtaaagagacactggtggagtacggcttccgcctgccatcagcgctggataaccgtccgcttaagtttgaagagttcgaagcattagcgccgcaaaccatctatgtttcggcgacgccgggtaattacgagctggaaaaatccggcggcgatgtggtggatcaggtggtgcgtccaaccggattgcttgacccgattatcgaagtgcggccggtggcgacacaggttgatgatcttctttcggagattcgtcagcgagcggcaattaacgaacgcgtactggtcaccacactgaccaagcggatggcggaagatcttaccgaatatctcgaagaacatggcgagcgcgtgcgttatcttcactcagatatcgacaccgtcgaacgtatggagattatccgcgacttgcgtctgggtgagttcgacgtgctggtagggatcaacttactgcgcgaaggtctggatatgccggaagtgtcgctggtggcgatcctcgacgctgacaaagaaggcttcctgcgttccgaacgttcgttgatccagaccattggtcgtgcggcacgtaacgttaacggtaaagcgattctctacggcgataagatcaccccatcaatggcgaaagcgattggcgaaaccgaacgtcgccgtgagaaacagcagaagtacaacgaggaacacggcattacgccgcaaggcttgaacaagaaagtggtcgatatcctggcgctggggcagaacattgccaaaaccaaagcgaagggcagaggaaaatcgcgcccgattgttgagccggataatgtgccgatggatatgtcgccgaaagcgttgcagcagaaaatccatgaactggaagggctgatgatgcaacacgcgcagaatctggagttcgaagaagcggcacaaattcgtgaccagttgcatcagttgcgtgagttgtttattgccgcatcgtaacaggatagcgaagaagactgatgacaaacggaaaacagcctgatgtgctacgcttatcaggcctacatgatctctgcaatacattgaattagcgcggtttgtaggccggataaggcgttcacgccgcatccggcataaacaacgcgcactttgtcttcaataggaagccggaatttttcttcggatttccgttaacctaaagcctgtaacgccttttccagcgcgttatgtaacaactggcggtcatgacgatacggaatatcgctggcctccagtacctcctgaatcacaatccgctctttcaccgccgagacatccacttttggcccgacgatgaccgcatcaatgacctttttaccaacatactgctccataattgccagcttgctttccagcttcaaattagccgcaggtaaactcaactcacgccccagattgccgatataaaccatcggcgctggcgtgcggcgtaatgcctgggcgatttccttcagcagcagaattggcatcaggctggtataaaaactgccaggcccaataatgatgagatccgcttcattgatagcgtgaaccgcctcacgcgttgcgggtacattaggcgttaacaataactcttgaatcggcgtagttaactggtcgatattgacctcgccgtaaacttcatgcccctgatcgtcaatcgccatcagatcgacgggatgctctgacattggaatcaaatgcgtatccactttcagcagattacgaattaaattgatggcttccagaggccgcacgctaaggtgatccagcgcctttaacatcaagtttccgagattatgaccggaaagttcgccattgccaccaaaacggtattcaaacatcgcggaggcgacgctcggttccgttatcagctggttgaggcagttgcgcatatcgccccaggcaatgccgccttctgaacggcgaatacgccccgtcgagccaccattatcggtggtggtgacgatacccgttaaacgagaacccaaagacgaaagtgatgagagaacgcgtcccagtccatgccctccgccgagagcaacgacacgatcaagatcagccagcgtacgattgcgcatatagtttcctggagtcagattatccgcgctacagtagcgcaaattgcggggaaacagcaattaacctgccaatattgaggatacaaactattttcttctacctctaaaggacgatgcacgctatgcctccctgatgatgtatatcaaagtaaaaccgccattttcccttattctgtagcgaaatagcacgatcatgacgctatatacatgattacatagcgaaagtgtggatggtaaaaatctcatttacacgctagtatcggcataaccactaaacactctagcctctgcacctgggtcaactgatacggtgctttggccgtgacaatgctcgtaaagattgccaccagggcgaaggaagaaatgacttcgcctcccgtatctggaaaggtgtacatggcttcacaactgactgatgcatttgcgcgtaagttttactacttgcgcctgtcgattaccgatgtgtgtaactttcgttgcacctactgcctgccggatggctacaaaccgagcggcgtcaccaataaaggctttcttaccgtcgatgaaattcgccgggttacgcgcgccttcgccagtctgggcaccgaaaaagtgcgcctgacaggcggtgagccgtctttacgccgcgactttaccgatatcatcgccgctgtgcgggaaaacgacgctatccgccagattgcggtcaccaccaatggttaccgtctggaacgcgatgtggcgaactggcgcgatgcgggacttactggcattaacgtcagtgtcgacagtctggacgcccgccagtttcacgctattaccgggcaggataaattcaaccaggtcatggcggggattgatgctgcatttgaggccggttttgagaaggtcaaagtcaataccgtgctgatgcgtgatgttaatcatcaccagctcgacacctttctgaactggatccagcatcgccctatccagctgcgtttcatcgaactgatggaaacgggcgagggcagcgagctcttccgtaagcatcacatctctggtcaggttctgcgtgacgagctactgcgtcgcggctggatccaccaattacgtcaacgcagcgacggtcccgcgcaagtcttttgccatccagattacgccggagagattggccttatcatgccgtatgaaaaagacttctgcgccacttgcaaccgcctgcgcgtttcctccattggtaaactccatctctgcctgtttggtgaaggcggcgttaacctgcgcgatctgctggaagacgatacccagcaacaggcgctggaagcgcgtatttcagcggcgctgcgggagaagaaacagacccatttcctgcatcaaaacaacaccggtattacgcaaaacttatcgtacattggcggctaaaacgtcaaaaggagagatcagatgagtcaggtaagcactgaatttatcccgacccgtattgctattcttacggtttctaatcgtcgcggtgaagaagacgatacctccggtcactatctgcgcgattcggcgcaagaagcgggccatcacgttgtcgataaagccattgtgaaagaaaaccgctacgctattcgcgctcaggtatctgcgtggatcgccagcgacgatgtacaagtggtattgattacgggtggtactggcctgacggaaggtgatcaggctcccgaagcattgctgccgttgttcgaccgtgaaattgaaggttttggtgaagtgttccggatgttgtcgtttgaagagattggcacttccacgttgcaatctcgtgcggtagcgggcgtcgccaacaaaacgctgattttcgccatgccgggttcgaccaaagcgtgccgtaccgcatgggaaaatatcatcgcgccgcagctggatgcccgtacgcgtccgtgtaatttccatccacatttgaagaaataagtatgtcgcaactgacccatatcaacgccgctggcgaagcgcacatggtggatgtctccgccaaagcggaaaccgtgcgtgaagcgcgggcggaagcctttgtcaccatgcgcagcgagacgctggcgatgattattgatggtcgccaccacaaaggcgacgtatttgccactgcgcgtattgccggtattcaggcggcaaaacgcacctgggatctgatcccgctctgtcatccgctgatgctcagcaaagttgaagtcaatttacaggccgagccggagcacaatcgggtgcgtatagaaaccttatgccgcctgaccgggaaaaccggtgtcgaaatggaagcattaaccgcggcctccgtggcggcgctgaccatttatgacatgtgcaaagcggtgcaaaaagatatggtgattggtccggtacgtttgctggcgaagagcggcggcaagtcgggtgactttaaggtggaagcggatgattaaagttctttttttcgcccaggtgcgcgagttggtgggaacagatgcaaccgaagtggctgcggatttcccaactgttgaagcgttacgccagcacatggctgcgcagagcgatcgctgggcgctggcgctggaagatggcaaattactggctgccgtcaacaagacgctggtgagttttgaccatccgctgactgacggcgacgaagtagctttcttcccgccggtaaccggaggttaagatggcagaaaccaaaattgttgttggtccgcagccgttcagcgtaggagaagagtacccgtggctggcggagcgtgacgaagacggtgcggtagtcacctttactggtaaggtgcgcaaccataacctgggcgacagcgtcaaagcattaacctcgaacactatccggggatgactgaaaaagcactggcagaaattgttgatgaagcgcgtaaccgctggccgctggggcgcgtcactgtgattcaccgcatcggggaattatggccgggcgatgaaatcgtttttgtcggtgtcaccagtgcgcatcgcagcagtgcgtttgaagccgggcagtttattatggattatctcaaaacccgcgcaccgttctggaagcgcgaagccacgccggaaggcgaccgctgggttgaagcccgggagagcgatcagcaggcggcaaaacgctggtagttttttgttagccggataaggcaccgctgcgtccggcaatttcaccgctcagtacatgcgtttacgctgcgtcgatgcacagcctcatcattttgcagtatccttaagatattccttatatcttcaggagatcgtcatggacagattcccacgttctgattcaatcgtacaaccccgggctggcttgcaaacttatatggcgcaagtctatggctggatgaccgttggcttgttgctgaccgcatttgttgcctggtatgcggctaattccgcggccgtgatggagctgttgttcactaaccgtgtctttttaatcggtctgatcatcgcgcaattagcattggttattgtgttatcagcgatgattcaaaagctgagcgcaggtgtaacgacgatgctctttatgctttattcggcgctgacgggtcttacgctttccagtatattcattgtctataccgctgcttctatcgccagtactttcgtcgttactgccgggatgttcggcgcaatgagcctgtacggttacaccacgaagcgcgatttaagtggctttggcaatatgctgtttatggcgttaatcggcattgtgctggcatcgctggtcaacttctggttgaaaagcgaagcattgatgtgggcagttacctacatcggcgtgattgtctttgtcggattgacggcgtatgacacgcagaaactgaaaaatatgggtgagcagattgatacccgcgacacgtcgaacctgcgcaaatattccattcttggcgcgttaaccttgtatctggacttcatcaacctgttcctgatgttgttgcggatcttcggcaaccgccgttaaattctcttcttcctgctgatcccggcctggagccgggatttttttcggattttataaagactattccgctcatttacatgagaactgaatcgcggcaaatgccagactatgtccactacgtaatttcagggacagataacgcatttgaacagacaatccactgctactcaattacagcaaaaaagtgcttcgctcagcaaaatgctgcttctcatttggtggttaacagcagctggagtatgggctacggcaggctgtgcctggatatttcagcatttgcattgggttacgtcacaaaagtctccaggtgcttttgtcttcgctttggctgcgctgataataggtggtctctggttaaacaacgccctgaaaagactgaatgtatcaggcgcatgtctggtctatctgctaataatccttcttgttggctttctcttcgccagcctttataccttttcgagcatagcgacggtaatgggaattacgggagggatgtttgccgcaatggcgctgatttgctcttgtagtaatagggttatcccaccagtcagacagttatattcatatattttctgtggtttgagtattgcttttgttgttaacctgatccttaccagcagtttttccgtgtggttagcgagtattttgactgtctttatctggggcattacggctgcctgtgaagcaacaacactggaagatttgatccgtgttgccgacacctctgaaatttcaggttctcttcgctgtatcgttcctggggcaataacactctattttagtattttaagcgtcctctttagaattactgtaacagttcttgaatttattaatggtttagtgtggtagtgcgaattgacgagttttattgcgttaattggaatagataatgatatttaacttaaggatataaaaataatgaattcgcgctcagcaaataacataactaatgattttcagcacgaagccaggatattaaacagcatatggctcattaccgctttaggtttggtgacaaccgcaggactggcctgggtagcgaagtatctcgaaattacggcaacaaaatatgattcaccgcaaatgtatgtcgccataggattattattactttgtatgtatggcttaagtaaggatatcaacaagataaatgccgtcatcgcaggcgtaatatatctatttttactctctttggtggcgattgtcgttgctagtttagctcctgtacctgccattatcgtcgtgttcagcactgcgggcgcgatgtttttaatcagtatgctggccggtttattatttaatgttgatcctggttctcaccgttttatcattatgatgacgttgacagggttggccctggtgatcatcatgaatgccgcattaatgagtgaacgacccgtttgggtaataagttgcttaatgattgtgttatggtcaggcattatctcgcatggacgaaataagctccttgaattggcggggaaatgccatagtgaagagttgtggagtccggttcgttgcgctgttacaggtgcattaacactctattactattttatcggcttctttgggatacttgccgcgatagctataacgcttgtctggcaaaggcatacgcgtttttttcattagtcgtaaatgcagatactaaagaacttaactaaacttcacatcgccgcttcatttttcgcccgtagcttcttcgcctggctttccagtagcaggtaacagatcagcgccagcagcagcgggataaagtaatacaggacgcgataagcgagtagggcggcgataattgtgcctttggatgtatgctcccagccagtagtgcgataaacaccgcttccagcacaccgatccccgccggaatatgcacgatgacgccagcaatactactaaccagtaacacgcccagtacaaagaaatagttcacgctttgaccaagtaacagccagataatcgcccccattaccatccagttaacgctggaaatcagcatctgagcgagggcgaatttccatgaaggcagcaccagcttttgccctttgatggtcatatggcggtgcttcgcgaaagcgcaaaaccacaaataaaccgcgataatcatcagtaagccaatgccgagaatacgcagcgtagtttgatcgacataccagtgatccggcaactccaccacgcctgcggtaaagataatccctgccagtaaaatatagcccagccagttggtggtaatactgagcgagaaaatccgcgtaatagtgctgcccggtaaccctagtcgggagtacaaacgatagcgcataccaatgccgccgacccaggtactgagcgtcaggttgaaggcgtagcagataaacgacaccagcatcacctggcgcttcgccagtttgtgaccgcagtaaaagcgggcgagcaggtcatagcagccgtaaatcagatagctgacgaccaccagcccgaccgcactaagcagcgcaacgcgattgtagtcgcggatgaccttccagacctcttcccagtccacttttttggcgtagaccaccagcaacacaatcaccgcgataaaaaacagccaggtgaggatcttctttgctaagcgccagcgcgggtgtgatttactcatcagggttttacccccgtgttttcagtttctacccgatcctgcgtttccattgtcggttgtgcgggcggatcaacctgcgccagacgtggtgtgtgtgccggaagccagccaaccagcgccgggaagtggcgtaaaaagtggaacgccagcacgcttttggtcaggttccaccaggtgcgtttcggcagcatggtctcatcgacctgctgacaatctgcggcaataatgccgttcagattatcgcgcagcgtctggttaaaatgacgatcgtggatgatgacatttgcttcgagattcagtgacaaactgagcggatcgagattactggaccctactgtcgcccagtgatcgtccatcaatgccactttgccgtggagcgggcggcggcggtactcaaatacctgaacgccgcctttaaccagatagttatacagcaagcgcgcaccgactctgacaatcggcatatccggttcgccctgaatgatcagtttgatccgcaccccgcgccgtgccgctttacgcaaggcgtgtaaaaatcgatagccggggaagaagtaggcgttggcgataatgacttctcgccgcgcctgagtgagcattttcagatagtgacgttcaatatcatcgcgatgttcttcgttatcgcgccagaccagcaatacctgcgcttctcccggctggcggttctcttccgctttgtgatgacgtcgccaccagcgtcgtgccgcgctctgtccaggcaggttttccagctcaaactggagaatatcttcgacaatcggcccttcaaggcgtaccgcgtaatcctgtttagcctctggaccgtagctggacatatgctcggcggagtaattcagcccgccaataaaggcgatacgcgcgtcgatcaccacaattttgcgatgcatccggcgaaacacattggtgcgcataccaaaaaggcgagggcggggatcgtagtagcgaaataccacgccagctgccgtcagttcattgacaaactcatcgctgagatccggcgaaccgtagccatccagcaagacttccgctttaaccccgcgttgcgctgctgccagtagtgccgcatgcagctgtttgccgacgtcatcctcaaaccagataaacgtttcaagaatgatgcgttcttgtgcctcgccaatcgccttaaacaccgcgggataatattgctcgccgttttccagcaactggatcttattgccttcgcgccagctacatttcataaatgaatctccgcacttaaaggggcatgatcagaaaggtgtcgccatgtccgcagcggcaacgcggttggcgcgctggcgctggcatttttgacgtagatcctgtccagtcgtagtagaggaaattgcaccggaaacgtgcgcgccgggcgtccgtgggcgcgggtaaaaatctcatccagtccggcctgcacttttaacggatgattagctttttgccgccagtcattgaaatcacccgccaccaataccggttcgccgtccggtagctcattcacccattcggcgagcatcgcaagctgcgcctgacggtgcgcctcacgcaggcccagatgtacgcacatcacatgaatcgcttttccggtcatcggtggcacaatgcggcagtagagcacgccgcgcttttccgcaccatcgaccgaaacatcgcgattctcataatgttcaatgggataacgcgacagtacggcgttgccgtgatgcccttccgggtatacggcattgcgaccgtaggcaaaatcgctccacatcgtgtcggcgagaaactcgtagtgcgaggtatcgggccagttttccacatgcagcggatgaacttcgtgcgcgcccatcacttcctgcaggcaaacaatatcggcgctgacggtacgcaccgcgtcgcgaagttccggcaaaatgaagcgtcggttaaacgcggtaaaacctttgtgaatgttgatggtgagcaccttgaacgaaaattgttgtgtttgatcgggcataattttcctgtctttgcctcttatctcattgaaatagtgtagtcggcgtcacaaaaaggtgcggtcttacggaattttccgtaaagttcggtactctgagtaagtagagataaattcttcaggagagaagccatgaagtggcaacaacgtgttcgtgtcgcaactggtctaagttgctggcagattatgttgcatttactggtagtggcgctgctggtggtgggctggatgagtaagactctggttcacgtcggcgtgggattatgcgcactgtattgtgtcacggtagtgatgatgttggtgtttcagcgccaccccgagcaacgctggcgtgaggtggcagacgtgctggaagagctgaccacgacctggtattttggcgcagcgctgattgtgctgtggctgttgtcccgtgtactggaaaacaactttttgctggcaattgcagggctggcaatccttgccggcccggcggtagtgtctttgctggcgaaagataagaagttacatcaccttacgtctaaacatcgcgtacgccgctgaccctgtcgtggccgttatcaccagtagcggccacaaactattccacacaatatccagactcgcatccttcaaataaatctgcttggtaatgtccgtaaagtggcgaatagggttaatccacgtcaggttttgcagccatactggcatgttttccaccggagaaacgtaaccggaaaggagaatggcgggcatcataaaaacaaacacgccgataaacgcctgctgttgtgtcgagcagagtgatgaaatcaacagaccgaatcccaccagcgataaaccgtaaatcaccatcgtaaagtagaacagcgccagcgatccggcgaaggggatttgatacgcccagataccaatcgccagcacaatggtggcctggaaggtggcgacaattaacgccggtacggctttgccgatgaagatctgccaggtggtgagcggcgaaaccagtagctgatcgagcgtaccttgttcacgttcgcgggcgacggaaagtgaagtgacgatcattacgccgatagtggtgatcatggcgatcagcgacggcaccacaaaccatttgtagtcaagattcgggttataccagttgcgtaccaccagctcgctgttgttaggtttcggttttccttccagcagctcctgctgataatttttgacgatctgttgcaggtagttggcggcaatttgcgcactgttggagttacgcccgtcgaggatcaactgcaacggcgcggtctggaaggtatccagtttgcgcgagaagtcagccgggaaacgcaccagtagtaacgccttttgtgtgtcgatggttgggcggatctcctgtgggcttttcagcagcagcacatgagtaaaggcgctggcgcgggcaaaacgttgggtcagctccaccgaatgctcgccgttatcttcatcgtagatggcgatggtggcgttagtcacttccagcgtggcggcgaacgggaacagaatcacctgaataagcacaggtaaaatcagaatcgcgcgggtttgcggttcgcgcagcagcgactgcaactctttgcggattaacgtccataagcgatgaaacatgctcttctccctaatccagccgacgtttggttttcagccacgtcaggccgataaacatcaccgccgaagcgatcaaaaacagcacgtttaccaccagcaccactggaatattcccggcgaggaacaggctttgcagggtgctgacgaaataacgagcgggaataatgtacgtcaccgcgcggatcaccgcgggcatactgtcgatctgaaaaataaagccggaaagcataatcgacggcaggaaagcggcgttcagggcgacctgagcggcattgaactggttgcgggtaatcgtggaaatcagcagccccatccccagggtactgagtaaaaacaggctggagataaaaaacagaatcagcagcgacccgcgatacggcacgccgagaataaacactgacaccagcatacacagcaacatcgccagcatcccgagaaagtaataagggatcagcttacacagcagcagttccgtgcgggtaatctccgtagagagcagagcctccatggtgccgcgttcccattctcgcgccaccaccagcgaggtgagaatcgcgccgatgaccgtcatgataatggtcaccgcaccggggataatgaagtgctggctaatcgccgccgggttaaaccagtagcgggtttgtacatcaataagcggttcaaaagtctgcccgttgtcctccgctcgctgcatttgccagatctgccagatcccttcgacatacccctgtacaaagttagcggtattcggctcactgccgtcggtgatcacctgaatcggtgcggtggcgttggcgcgctccatctgttccgcaaaatccaccggaataaccaccagaccgcgaattttccccgcctgcattttggcgatcagttcctgacggttatcgctgatggtggcgtcgatgtagggcgaaccggtcatggtgtgggtgaaatccagcgccgcttcgctacgctgttccagtaaaatcccgacccgcagcttgctggagtcgaggttaatgccgtaaccaaaaataaacagcagtagcagcgggatcactaccgcaatcagccagctactcggatcgcgaacgatctgccgcgtctctttaacgcacagcgcccgtacgcgacgccaggacaggatcgggttactcattgctatgctccttatcccagtcgtggatcaactgaataaaggcttgctccatggtgggatcgggttgctcgtcgttggccgactgcgctttcaaatcatccggcgtgccgctggcaattaatttcccacggtacaccaggccgatgcggtcgcaatattctgcttcatccataaagtgggtggtgaccatcaccgtgacgcctttctctaccatgctgttgatatgtagccagaattcgcggcgagtaatcggatcaacgccggacgtcggttcgtcgagaaacagaatgtccggttcatgcatcagcgagcaggccagtgccagccgctgtttaaaacctaatggcagttcatcggtggcgtgggaggcgatacttttcaggccgaacgcctcgctcatacgggagattttttcgttctgcgcccgaccgcgtaagccatacacaccagagaaaaagcgtaaattctgttcgaccgtcaggttaccgtagagcgaaaacttttgcgccatatagccgagatgctggcgcgctttaccagaactctctttcagatccatccccagcaccagcgcctggccggaagtcggcaccagcaaaccgcacatcatcttaaaggtggtcgatttacccgcgccgtttggccccagcaaaccaaaaatctccccacgtttaacggcaaagttgacgtgatcggtggcggcaaaatcaccaaatttcttggtcagttctttcgcttcgatcaccgtctcgccgggtgtgccttctaccgtatgtaatattgcgcccagcggcgattctgaggttccggcaccacccagcaaatcaataaatgcatcttcaaaacgcggcgtagtttcgttgatgttgatttccggcatcccgtcggcatggcgaatatcgtctggtgtggcctcttttttgaggatcagacgtaccgatttcccctgaatcatgccgtcgctgacctgtggcagtttcaaggcgcgttgcaatagtttgcggttgccctcgtgtggactggtcatcagaaaactgcgtccggccatggtttgtgtcagggcttttggttccccctgatacagcaactcgccttcgttcatcagtaacacgtcacggcactgctcggcttcgtcgagatacgaggtactccagaggattaacatcccttcgcctgccagctcatgcaccatctgccacagttcgcgccgtgagatagggtcaacgccgacgccgggttcatcgagcagcaacactttcggttcgcccaccagggtacaggccagaccgagtttttgtttcatcccaccggagagcttgcccgccaggcgtccggtaaacggcccaagagacgtaaactccagcaggcgagcaaaagtttgcttacgtgcctcgccggtgacgctgcgcaaatccgcgtacagattgaggttctccatcaccgtgagatcttcatacagaccaaatttctgcggcatatagccgagcacggcgtgcagcgcgccgtcgtttttgattggatcaaagccaatcaccgtggcattgccgctgtcgggtttcagtaatcccgccagcatccgcattagcgtggttttacctgcaccatccggccccaccagccccgtcacataaccggcgtgaatggtacaatcgagcggcgcgacggcgggcttgtccatgcccggaaagcgtttttccaggccgttcagcgtgataacggcatcattcatgtcctgcctcgttaccgaattgcaccgtcaccggcattccctggcgtaacgcatcatcggcgtcggtcaccacaatacgcaggcgatagacgaggtcggtacgcagatccggtgtttcgacggttttcggggtaaattcagcagtcggcgaaacgaaaccaatctgcccgtgatagggcttgtccgggcgaccatcggtataaagcagcactttgcgccccggctgggcctggtcaagattacgttcgtcaacataggcacgtacccacaccggacgcgttagtgaaacggtaaacaccgtgccaccttcattgagaaccgtgcctggctccaccgcgcgcgttaacagcgtgccatcagacggggctatcaacgttgagtcctgcaaattcaactccgcctgcgccagttgcgcctgcgcctgttcgaggctggctttcgcctgggcgatgtcctgttcacggttaccggaacggtactgacgcaatttatcctgtgctgatttcagcgttgcctgcgcctggtcgcgcgaggagcgggcattttccaggtcgtttgccgaaatggtgcggcttttccacaacccttgctggcggttatagaagttctgcgcatagtcataggcggcttgcgcctgtttcaccgctgcggcggcctgagcgatttcttcatcgcgatacccggcaagcatcaggtcatactgcgcctgtgccaccgagacgcccgctttcgcctgcatcagggcaatctcatacggcttgtgatccagttcgcccagcacctggcccgctttgatcgcatcaccttcgtccaccgccagcgattcaacgcgccccccaacacggaaactaagatttaccgtacgaatatccacgttgccatacagcgtcaggccgttatcctggcggctttgataccaccagtagcctccggcaaccacggcggcaagtaccactaccgccaatccgatcacgacaggttttttcatcactacaaactcctttgcgataatccttgcaaaatcaggtcgatatgacaggtcaccgtctggttgatcagttcggtcttttcttcatcgaacgcggtccagccggtacgtaacagaattgtttctttgccaagacggaacgccagaatctcaccaatcaacgcatgagtatggaggatcatgcgggtatcgttggcgtcgcagccggtccaggcggcaatcaggcgtgtcaggtggctgtgtagcgggctaatcacctgttcgtgcaccaggtgataggctgccgtgggagagagcctgctcacgggagtaacttgctgaggttgacggtgtcatcctgggtgagcagcttaatcatgttcctgcaggcgcgaaggatcagttcacggatggctgcgcgatcaggctgtggttgtgcgaacaagcgttcggcctcttcggcgtgcggacggaactgctcgccaataaaatcggcaatccactgggcgcaggcgaggtacaaatcttctttcgaaccgaagtagtaggtgatggcagcgatattctgcccggcctgggcggctatctcgcgggtggtggcgttcattccatattcaccaaactgcgccagtgcggcagcaatcagctgttttttcgcctgttcacccttgattgtcatggcaggattattcatcgcacagtccattcttaatcaaatgattgattaagattatgactccatatgggagttgtccagtatggctaagaattttagctacgccagtcacagggataatttatgcgctgcgtcacaaaaactgctacactccgctccctcatgacattgtggtttttgtcattttccttttcagtatctccctgaaaactacaccggtaacggtcggggcggttcggagtagttatgtctttcgattctttgggtttaagccctgatatcctgcgcgccgttgccgagcagggttaccgtgaacccacccctattcagcagcaggcgatccctgcggtgctggaaggccgcgacctgatggctagcgcccagaccggtaccggtaaaacagcgggctttacgctgccgctgttgcaacacctgatcactcgccagccgcacgccaaagggcgtcgtccggtacgtgcgctcattcttaccccgacccgtgaactggctgcgcagattggcgaaaacgtccgtgattacagcaaatatttgaacattcgttcgctggtggtgtttggcggtgtcagcattaacccgcaaatgatgaagctgcgcggcggcgttgatgttctggtggcaacaccgggacgtttgctggacctggaacatcaaaatgcagtgaagctggatcaggttgaaatcctcgtcctcgatgaagctgaccgcatgctcgacatgggctttatccacgatatccgtcgcgtgttaacaaaactgccagcgaaacgccagaacctgctgttctctgcgaccttctctgacgatattaaagccctggcggaaaaactgttgcacaacccgctggaaatcgaagtggcacgccgcaataccgcgtctgatcaggtgacccagcacgttcactttgtcgataagaaacgcaaacgcgaattgctgtcgcacatgattggtaaagggaactggcagcaggtgctggtgtttacccgtaccaaacacggcgctaaccatctggctgagcagctcaataaagatggcatccgtagtgcggcgatccacgggaataaatcgcaaggtgcgcgtacccgtgcgctggctgattttaaatcgggtgacattcgcgtactggtggcgaccgatatcgctgcgcgcggtctggatatcgaagagttgccgcacgtcgtcaactatgaactgccaaacgtaccggaagattatgtccaccgtatcgggcgtaccggtcgtgcggctgctaccggtgaagcgttgtcgctggtgtgtgttgatgaacacaaactgctgcgtgatatcgaaaaactgctgaaaaaagagatcccgcgcattgcgattccgggctatgagccggacccgtcaatcaaagccgaaccgatccagaacggtcgccagcaacgtggcggcggcggtcgtgggcaaggtggtggtcgcggtcaacagcaaccacgccgtggggaaggtggcgcaaaatctgcaagcgcgaaacctgcagaaaaaccgtctcgccgcctcggcgatgccaaaccggcaggcgaacaacaacgtcgccgccgtccgcgtaaacctgctgctgcgcagtaatctttaatgccgggctatgcccggcatcaggctgatgaacaaacgcaaaactgcctgatgcgctacgcttatcaggcctacgtgaactctgcaatatattgaatttgcatacttttgtaggccggataaggcgtttacgccgcatccggcatttcacaacaagcacttgtcagcaatttgagaacacgggaaaaaatttatctgttttaccgcccataagccaccgagacgttacttctctatagccaattgttcgcgcaactccattaaaaggtagcccagtcgattcttgcccttaccattaccaccgtctccccagtaagcatcgttttccgtatgctcaaccagttttgcgggcgcggttgccagcaagagcgcacgcagttctggatgctgttcgaatttagcgcgaagtgcttttcgcatcacctgttctttgaccgactcccagtttttacgcagaggcttagaacgatcgcgccccatgcgtgcggcgaccataggggaagaaacccgacggatctcttcgcggtatttttcatcaaggaatttttgtgcctgaaaatagtgttctgaggtgggccaggttttcccgtcaaccttgatgggccaggcggcaaagttagaaaaatcaccgtagtcatcgctggtgctgtagaaatttatgatggtgtcttgcatgacgtgttggatcctttgtgctcgaacgggcattaaaccgcattatgttggtggttattgcgagccgctttccagaaacagaaaaaccattacccctgaaaaccgaaaaatgccacaatattggctgtttatacagtatttcaggttttctcatggcattaaccgccgcgcttaaagcgcaaattgccgcctggtataaggcgcttcaggaacagatccccgactttattccccgtgcgccgcagcggcagatgattgcggacgtcgccaaaacgctggccggagaagaagggcggcatctggcgattgaagcccccaccggcgttgggaaaacgctctcttatttgattcccggcatcgccattgcccgcgaagagcaaaaaacgctggtggtgagtaccgccaacgtggcgttgcaggatcagatttacagcaaagatttaccgctgctgaaaaagatcattcccgatcttaaattcactgccgcttttgggcgtgggcgctacgtttgcccgcgtaatctgacggcgctcgccagcactgagcccacgcaacaggatctgctggcgtttcttgacgacgaactgacgccaaataatcaggaagagcaaaaacgttgtgcgaagctgaagggcgatctcgacacttataaatgggatggtctgcgcgatcatactgatatcgctatagatgacgatctctggcgtcgtttaagtaccgacaaagccagctgcctcaaccgcaactgttactactatcgtgaatgcccgttttttgttgctcgtcgggagattcaggaagcggaagtggtggtggcaaaccatgcgctggtgatggcggcgatggaaagcgaagccgtactacctgacccgaaaaatctgctgctggtgctggacgaaggtcatcacctgccagatgtggcccgggatgcgctggagatgagtgccgaaatcaccgcgccctggtatcgactacagctggacttgttcacgaaactggtcgctacctgcatggagcagtttcgcccgaagaccatcccaccgctggcgatccctgaacgtttgaatgcgcattgtgaagagttgtatgagcttatcgcctcgttaaacaacattctcaatctctacatgcctgccgggcaggaggcagagcaccgttttgcgatgggcgaactgcctgatgaagtgctggagatctgccagcggctggcaaaactcaccgagatgctgcgtggtctggcggagttatttcttaacgatttaagtgagaaaaccggcagccacgatattgtgcgtctgcatcggttgattttgcagatgaaccgcgcgttggggatgttcgaggcgcaaagcaaactctggcggctggcgtctctggcgcaatcttccggtgcgccggtgaccaaatgggcgacgcgggaagagcgcgaagggcagctgcatctctggtttcactgcgtggggatacgtgtcagcgatcagctggaaaggctgctgtggcgcagtattccgcacattattgttacctccgcaaccttgcgttcgctgaatagtttttcgcgtttgcaggagatgagtggtctgaaagagaaagcgggcgaccgttttgtggcgctggattccccctttaaccactgcgaacagggcaaaattgttattccccggatgcgcgttgagccttccatcgacaacgaagagcagcatattgccgaaatggcggcctttttccgtaagcaggtggagagcaaaaaacatctcggtatgttggtactgtttgccagcggacgggcgatgcagcgctttctcgactatgtgacggatttacgcctgatgctgctggtgcagggcgatcagccgcgttatcgcttagttgaactgcaccgcaaacgcgttgccaacggtgagcgtagtgtgctggtgggcttacagtcatttgccgaagggcttgatttgaaaggtgatctgctcagccaggtgcatatccacaaaatcgcttttccgcccatcgacagcccggtggtgatcaccgaaggggaatggctgaaaagcctcaaccgctatccgtttgaggtgcaaagcctgccgagcgcctcgtttaacctgattcagcaggttgggcgactgattcgaagccacggttgctggggcgaagtggttatctacgacaaacgcttgctgaccaaaaattatggcaagcgactactggatgcattaccggtatttccgatagagcaaccggaagtccctgaaggtatagttaaaaagaaagaaaaaacgaaatccccacgccgtcggcggcgttaatgatgtgagtcaggtaaggagtcgtaaatggactatcgcaaaatcattaaagagatcgggcgcgggaaaaaccacgcgcgcgatttagaccgggatactgcgcgcggtctgtatgcccatatgctcaatggtgaagtccctgaccttgagttgggcggcgtattgattgcgctacgtatcaaaggggaaggggaagcagagatgctcggcttttacgaagccatgcaaaatcacaccatcaagctgacgccgcctgcaggcaagccgatgccgattgtcatccccagttacaacggcgcgcgtaaacaggccaacctgacgccgttgttggcgattctcctgcacaaactcggttttcctgtggtggttcacggggttagcgaagatccaacccgcgtgctgactgaaaccatttttgaattgatgggtattacgccaacgttgcacggcgggcaggcgcaggcgaagctcgacgaacatcaaccggtgtttatgccagtcggcgcgttttgcccgccgctggaaaaacaactggcgatgcgctggcggatgggcgtgcgtaacagtgcacataccctggcgaaactggcgacgccatttgccgaaggtgaggcgctgcgtctttccagcgtttcgcatccggaatacattggacgcgtcgcgaagttctttagcgatatcggcgggcgggcgctactaatgcatggtactgaaggtgaagtgtatgctaatccgcagcgctgcccgcagatcaatctcattgaccgtgaagggatgcgggtgctgtatgaaaaacaggaccctgctggtagcgagttactgccacaagcaaaagatccggaaaccacggcgcagtggattgagcgttgccttgctggcagcgaaccgattcccgaatcgctgaaaatccagatggcttgctgcctggtggctacgggtgaagcggcaactatcagcgacggcctggcgcgcgttaatcaggcattttaattcttttctcagccggatgagccatgtcatccggcttttaccccaccgcaatatgaaattcctgcatctttattgaccttcccgcgcccggcgtgcagcataaaaaaacaacaaacacataacataaacaggagttaaccatggaaagtggtcatcgctttgatgctcagacgctgcacagttttattcaggctgtatttcgtcagatgggtagcgaggaacaagaagcgaaattagtggccgatcatttaatcgcggcaaacctggcagggcatgattctcatggtattggcatgatcccaagctatgtgcgttcctggagtcaggggcatctgcaaattaaccatcatgccaaaatcgttaaagaggcgggggcggcagtcacgctcgatggcgatcgcgcattcggtcaggtcgcggcacacgaagcgatggcgctggggattgagaaagcgcatcagcacggtattgctgccgtggcgctacataactcgcatcatatcggccgtatcggttactgggcggagcagtgtgcagcggcggggtttgtctctatccactttgttagcgtggtcggtattccaatggtcgcaccgttccacggtcgcgacagccgctttggcaccaatccgttctgtgtggttttccctcgtaaagataatttcccgctgttgcttgattacgccaccagcgccattgcatttggcaaaacccgcgtcgcctggcataaaggcgtccccgtgccgccaggttgcctgattgacgttaacggcgtgccgacgaccaatccggcggtaatgcaggagtcgccgttgggttcgctgttgacctttgccgaacataaaggctacgcccttgcagcgatgtgtgaaattcttggcggggcgctttccggcggtaaaacgacgcatcaggaaacgttacaaaccagtcccgatgccattcttaactgcatgaccactatcatcatcaacccggaactcttcggcgcgccggattgtagcgcgcagaccgaagcctttgccgagtgggtgaaagcctcgccgcatgatgatgataagccgattttgctaccgggcgagtgggaagtgaacacgcgtcgcgaacggcaggagcaggggattccattggatgcgggaagctggcaggccatttgtgatgcggcgcggcagattggtatgtcggaagagacgttgcaggctttctgtcagcagttagccagctaaaaaaaagcccgtccagtggcggacgggcaaacaagggtaacataggatcaatgagggttagagcatatgcgtctgtcggcaaacagacagggaaatacttgtgctggacgtagcgtaaacgcctgatccgtccaacggttcggattttgtaggcctgataagacgcggtagcgtcgcatcaggcatctgttgccggatgcggcgtaaacgccttatccgtcctacgaattacttataaattaccgcagtaccgcttaatttattgttgttggtggcggaagtgatgctgtatccactggcaccggctgccgcggctttctcagccagtttcgcttccagggcatcgagggtggatgcgccatcggcagaaaccacgccgattttattcatgttctgtgcctgggatgccgttaccggttccgcggcaaacacgccaaatgacagagttgaaagagccatagcagcaacaacagtattgatagttttcataattaatctctcgcaggtgatttttgtataagtgacgttgtttcgtcgatgtgatgagtatcacgtttttttacgagagataaaatcgaagagaattgaccgccttgttcaaataaattgattgatatctaacatactgataaaccatttatttgttgtacttatggacttgttttatgccgcgtggcagtcacagcagcgttaaaggcacggaatgccacgcaaaatacaaattatactcgctatgcatctcgccagttgtagttaacgtaactggctgtctttcgaacctctgcgattatatcctgtatacgctggtttttgtaaatctttctcctgctgacaatgaatacataagcgcacgccaggaatggcttcccgacgggcttgcgggatgggggcaccgcactcttcacattcatccaggctttcgccacgcggaatttcaccccgagcgcgggcaatcgcatcttcaattgtactgttgatctgttcgttgacggcgtcatcgttagcccaaccggatgccatatcgtcctccccatatcaatgcttgtacagttaagtgtagctaatccagggacgaacctgggcagttcaagcatcagatctccgaccattcccgcagcagattatgataaagattaagcagcgacaggatctcttcactttcgccgtagcggcttttcagcgactgaatattgttgtccagttcaaacagcatggcgcgctttttatcatcacggatcatcgactggatccacataaatgatgccactcgtacgccgcgggttacgggtgtcacgcaatgcaggctgctggagggatacaacacgagatcgcctgccgggagttttacccgatgttgtccgaaggtgtcattaacgaccagttcgccgccgtcgtagctttgtggatcgcttaaaaacagcgtggcagaaaggtcagtacgcatccagccgttttgtggatggctgcgtactgcgccatccacatggaaaccataggtttcattgttctgatagcgattaaacagcggcgtggaaagggtacgcggcaaggccgcggcaaagaacaaagcattttggttaaccgcgttcagcacctcattttgcagggcggcgtataacgtgctgcgggtgtcgacctgttgattgttcttaacttgcgcaccttgtgcgccggtggtgatgcgtccatccacccattcggcttgttccagttgttcgcgaaaccgggcgacgtcctgtggcgataacacgccgggaatgtggtacatcatacaagttctccaaaaagtggggcctgcgccccacatctgaatcagaaatgcatattggctgtgagcaagaaggttcttggctcgcccgggtgataacggtagccgctcttgttgattgaggcgacgtaatcggtatcaaacaggttgtaaacgtttagctggaagtcgagattgcgattaacccgataccccagtttggcatcggcgacccagtaaccttcggtaaacgctggcgttcccaccgcgccgtctgaacctttatgcatactgccgatatagcgtgcgcccgcgccaacagagatatcatctgttgcctgatactggctccataaggtgaaggcgtgctccggggtatacggcagcgatgaggaaccatcctgggcaacatctttgccgtttttgatggttgctttttgctgggtatagccgccaatcacctgccacgcgggagtgatattcccggccacggatatctcatagccttcgacacgtttcttaccgtattgcgagtaagttccgtcatcattttgctcaacttcattttcgatatcagtacggaacagcgcggcggtgagcaacaggcgtttatccagaacctgccatttggtgccaatctcgctggtgttggctttttgcggtttaaaatcggtgcggttggcactgttaccgctgccagactgcgcaagggcgaagttgttgccgcccggaggctgctgggaaacggcatagttaatatagacattaccgttttccgtcaggtgatacagcgccccggctttccagttcaccagattgcccgacttggcggtgtcgacggtggtgaccggagaaccttttgccacaccagttgggcaggtgatggcaccgcgtccgctgccgccgcaggcggtggcactgtcatattcagtatgataattatccagacggatcccgccgttcagctcaaaatcacgggtgatttgcagcgtatcgaaggcgtaaattgcgaaggtatccgtctgaccattggcgtttgcgccgttgcgcgtcaggccgccgggatgaatgctgctgtcaggatgataaatatttaccgcgggtaacgtcaccggattaacgccgtagttagtctgcgtttcacgggtaaattccacgccggtactgacatcatgaccgatagaaccggtatagaacgtcgaggtcaggttggtctggttggtgagaattttattactcacatctttggtattcgccgtgcgtgaccaggtccagctattcacatcgctggtgggctgagtaatattcgacgccccgcccataatcgccgtcatcaggtaatcctgctttacgcgcgaccaacgggtagtattgcgaatggtggtgttatcgttgatgtcgtgctcaaaacgcatggtggcggtgtcggtggtcgaatcgtcgtaatcggaatccgtgccgtaaaagttatgagtatcaacttttccggaatgattcagagccgctgttcccgcagatggggcagaataacccggcaaaccgatggtcggaatgccgccgtctggcgtgttgtgctgggtgacatgcagataattaagatacaaacgattcgctgtaccaaggccaaaagcgatagaaggggcgacgccgtaacgctcatttttgactttgtcgcgtccggcatcgtgcgttttttcgcccatcacattcaggcgcaccgcagtggtatcaccaatgacctgattgacgtccagcgtgccgcggcggaaccaggcgctgccaatactggcggaggcgtcaatgccggaatcattgcgcggctgcttgctgatcatattgatcgagcccgtcggcgcgctgcgcccgtagtcggtgccggaaggccctttaatcacttcgacctgctcagtattgaaggtgtcgcgcgagacgctgccgatatcgcgaatgccatcaatataaatactgttagaggtatcagcaccgcgcatataaatggcgtcgccagtggtggagttaccgttctcacccgcaaaaaacgcacccacgccggggacgtttttgagcgcgtcggtaaggttggttgcgccctgatctttaatcacttgttcagaaatcaccgtcatcgtgcgggtagtatccgctaccggacgcgagaatttcggatcggcagattgttgtggcgcataaagcgaaggcgttgatgcttcgacaaccagcgtgtcatccgcgttagtttgcccttcggcggcgagtgcctgagccacaggcgtgatgccaatacaaagaccggcaaagaacgtgagcgaatgaaattgtctggcagggaaattgcgattgttttccattttgcaggtgactttttttatatgttgaaattttcactgccacgagaaagcctctctgcggatgcgatgccactgttaatctcgtgatagcgttcgtgcaagtgataataattttgataagcattatcacttggcgcgattttctatcacccattgcgcgaaaaagaaatacatttatttacattgcgttcatatttgatgttttttgattacaaaacaggcgaaaactgcatccagaggcgaatgcagttacgttggtggggttatttgtagatggttgcagtaccgaacatctggtcatttccgcctgcggaattaatgacataacctttcgcgccttgctcgcgcgctttttctgccagtttatcctccagatcgcttaggtttgatgcgccagttgccgaaacggtaccggcgggccgtagctgaccgctgtccaggttactcatcggttgcgcggcataagtcgtgagagagattccgctcaggacggtggcaatcagtagtgtgaggcactttttcataatgacatcctcataaatacaacgggtagtgcctgataagtgtaggtcgcctgggcgatgaaaatgacgcaaaaaattgacagagatgtgcttattttttgaacgatatatttttacaaaataagacaaatcaatgacatgcataatgctgatttttatgatgaattgccataaaccatagccatgttaaggttttggggaatgataaacgcagccagatatttaccctgtcgcgttatgcgggtatcttacgccgctgcttaaaggaaaatgctatgtccgcccagaaaccggggttgcatccgcgcaaccgtcatcacagccgctacgatctcgccacgctttgtcagatcaatcctgaactcaggcaattcctcacgcttacacccgcaggggagcaaagcgtagactttgccaatccgctggcggtgaaggcgctcaataaggcattgctggcccatttttacgccgtagcgaactgggatatcccggacggttttctctgcccgccagtaccgggccgggcggattatattcatcaccttgccgatttactggcagaagcaagcggaacaattccagctaatgccagcattctggatatcggcgttggtgcgaactgtatttatccgctgattggcgtacatgaatatggctggcgttttaccggtagtgaaaccagcagtcaggcgttaagtagtgcgcaggcgatcatcagtgctaatccggggcttaaccgcgccattcgtctgcgtcggcaaaaagagagtggggcgatttttaacggcatcatccataaaaacgagcaatacgacgcgaccttgtgtaacccgccattccacgattccgccgctgcggcacgggcaggtagtgagcgtaaacgccgtaacctggggctgaacaaagacgatgcactgaactttggcggccagcaacaggagttgtggtgtgaaggtggtgaagtcgcctttatcaaaaagatgattgaagagagcaaaggcttcgcgaagcaggtgatgtggtttacctcgctggtttctcgtggtgaaaacttaccgccgttgtatcgtgctctgacggacgtgggcgcggtgaaggtggttaaaaaagagatggcccaggggcaaaagcagagtcgctttattgcctggacctttatgaacgacgagcagcgccgccgttttgttaatcgccaacgttaaagcgttggctcccccggcggcagcggttcagccggggccgcgcccggagcaggcagcacctgataagtctgcactggcgcgcgaacacctgccaggtcgaaatgctttttcacctggctgtcgagggcaaagcggaccgtccactgtttgagtggcagcgtggtgaacgaaacacgcagtgtaaacgcggtattgcttaagccgacaatcccggcaaagtttggttcaccaataaccagcccgcgaatttcttcgttttccatcaattccgctaccgcatctttcagtgcctgattggctttatcagcatcttcatggcgatcaacatcgtagtttgccaccaccgaaccaatgccgcggacgaagttagcaaaggtggttatcgaagaccaaggaatgatgtgatacgccccggtatcctgacgcacgcccacggagcgaatcgacatccgttccacagtgccggtcaacggcccgatagtaaccaaatctccagtgttcatgccgttttcaaactgaataaataccccggtgataatatctttcaccagcgtttgcgaaccaaacgagatagccagacctaatgccccagcacctgccagcaatggcgcgatattgacgccgatttccgacaacacaatcatgatggtgatggtactgataatcaccgccagcgcgttacggaacagcgtcagcagggtacgcgtacgggcgctgggtagcgggcggccatgaatatccgaagccagccggttttcgatcaaactggcgagcactgtccagccaaccgccgagaagaaaagaatgagtgcgatgcggatcaggatatctacggttttctgccccgcgccgttttgcagccagttccagaaatcgaacaatccccatgcgctcaatagcaacattaccgccacgcagacggtcagaatacgcgccgttttcagcgccgccgaaagccagccattcagccgtttttgtagctccggatagttacgctgagtatgtggcgagagggtgatggttttcgccagccagcgggaaaacataccggaaacaaacgctgcgataccaataatcgccaggctgcgcaccgttgcacccatcataaatttcaggctgttgcccggatcgaacaacgaaaagaaaaacagcacgataaaataggcgcttgccagccagtgccacaccagcgcaaaggcgcggataaacaggctgaaaaaggccagcgaatgctccgcaaagttgagcaaatgttgggtaatctcttttttattgcgaaagatcaggtacaacgcccagacggtcatgcacagcataatgatgatgttcgccagcgcacctatctgtacattcacctgattagagataatcggcacggccacaatcaggccataacctatcaaactgcttaaccagctcaggcgacgactccagtaacgggcgctctcgtcctgaatcgtgaacgggcgcagttcagccacgtttgggcaaaaaatcaggcgtagtacggctttgaaaaattcaatcagggcaaaggcgttgagaaacaaactttgttggaaagcgatggtgcgactgcccgcattcaggttgtcgcttaatacctggccgacaaacaatgtcagtgccagtaacagtaggtcgataataaacgccccgataatcatcgccggaagctgcagccagttgctgcgttcgcgatttttttgccgcgcccactggcccattttgcgatacagcggcagtgcgcacagacgaatcagccagtaaaaaccaaacactaataccgctaacattgaaaaatgggtcaacgcattgctgaaggtttgtggattaaacggcttatgcggggagccggtgatattgcgataaagttgtccgaagcgggcggaaagggcttcaccataatggcggctgacttcggtgaccttttgcagcacggtttgctcttcaaccagcgtcggcggcacgatcttcgggaccggttccgcagggggcgtcgcggcgacagtacgcaactggtcgatcaattctttacgcgaggtgtcgttatccagcacatccgccagtgcgccataggccgcttttttttgttcgatatccggttccggggccggttcagtcgttgagtccgttgtcgttgtggttgtaacgccgggtatggataccgcgtgggcaggtgcgcccagcaggcagaagaggatgaacaggatccaccgcatgactcctccagtgagaaaacagagcaaaaagataagtatagatgctgggggaggggcgattttaaatgagaggaatctggtgtgcctccctttcgggtgaaagggaggcagagaagttaagagacgtgctgcaaaaattcctgcaagcgctggctcggcgggttcttgatcaatacctgcggatcgccatcttccgcaatccggcctttgtcgataaagatcagccgcgaagctactttctcggcaaaaccgatttcgtgggtcacgatcaccatcgtcatcccttcttcagccagatcctgcataaccttcagcacttcatggcgcagttccgggtcaagagcggaagtcggttcatcaaacagcatcattttcggcttcaccgccagcgcgcgggcaatcgccacacgctgctgttgaccaccagaaagttcggaagggtagtgatgtgcacgttctgccagaccgactttcgccagcagctcacgcgccagtttttccgcctcttctttgttcgcgccacgcacgcgtagcggaccaaacatgacgttttccagcgccgtcagatgcgggaagaggtaaaactgctggaacaccatacctgcttcctggcgaatcaggcgctcgtcaactttcggatcgttaaccttcaggccatcgacaatcagatcgccggaggtgatttcttccagtttgttgatgcagcgcagcagggtcgatttaccggaaccggacggcccgataatcaccacgacttcgccctgggcaatgttcaaatcgatattgtgcagcacctgggttgggccaaagtgcttggagacgtttttaaattcaatcacaggattttcatccttctttccagacgacgcagaataaagctcagcacaagggtaataatcagatagaacaccgccacggcgctccagatctcaagggcgcggaagttaccggcaataatttcttgcccctgacgggtcagttccgccacgccgatcacaataaacagcgaggtgtctttaatgctgatgatccactggttacccagcggcggcagcatacgacgcagtgccagcggtaaaatgacgtagcgaatggtttcccaacgtgaaagaccgagcgccagtcctgcttcacgaaaacctttgtggatagacagcaccgcaccacgcgtgatttccgcaatgtacgcgccggagttgatcatgatggtgaccaccgccgcagtaaatgggtcgatgcgtaagtcgttaaacgccatcggcagggcgaaatagataaacatcacctggacgacgataggtgtgccgcggatcacttcaataaagaccagcgcgacgtggttggctatccaaccaccgaaggtgcgtgcaaaacctgccagcaatccgattaccagaccgcctgccagaccgaggaccgaaatccacagggtcattttggcaccttcaatcagaagcggaatggcaggccagatggcactccagtcaaactgcatatgttgttcctgttaccgtggtgtaaataatcaaattcagggtaattaatggccccggagcgggtttgcgcccctcaccctaatcctctccccataggggagagggaactgccagtgcgttttacaggtgtagcgttattatttcggttcagtaccgaaccattttttgtagatttcgttgtaagttccgttctcgcgcagggttttcaacgcgccgttgactttgtcacgcagctcgtcgctacctttcgggaacgcaataccgtattgctgcgcttccagagagtcacctaccgctttgaactgaccgttaccggcggttttgatgaagtacagaatgtttggcgtatcgtgcagaacggcgtctgcgcggttggtgcccagttccatataggcgttatcgatgttcgggaactgacgcagatctttagttttgatgtttgctttcgcgtaatcaacggagccagtaccgctcttcacagcaaccactttcccgtcgagatctttcacgcttttcacatcgttattgttagctttcaccatcactaacaggccgcttttgtagtagccgtcagagaaatcgatcgcttttttacgctcgtcggtgatggtaatgcccgccagcgccagatcgacgtttttggtttgcagtgccggaatgatcccactgaaatccatcggcttcagttcgtaatccagcttcagctctttagcgatggcagcccacagatcaacgtcaaagcccacatatttatcgccctgtttaaattcaaacggaacgaaggcggtatccgtcgcgacaactaattttttatccgcggcatgagaagaaaccgcaaaagccagggtcagtgcagccagtgaaacttttaatacagacttcatagcatttccttttttctatccacgggacgatcccctgcgtgacattcacatatatgaaaaaatcgtgccagttttgcaactccttgatttttcgagatgcggcaaaaacgtgatgcacgatttatagggcaataccctgaagatgcaccattctggggcaccaatctggtgcgctaaaattgtgcactcaacacagtgattatttagcgtaaaacctgatgaaaaaacaatctttatgtaacgattgtgtgatgatgtggatacaaaaaatttacttaatcagctggagatagcagatggatgcactaaataagtgcgttgaggtgggctgcaaaacaaaacggcctcctgtcaggaagccgcttttatcgggtactaaagttctgcaccatcagcgatggatttattcgatgttagactcgataaaccacaggaatttatccaggtcgcgagacgcggcggtcaggatatctgcggtgtcgtcatctttcgcttcgccaatcgctttgcgtacgtcattagcgacgattgcgtaacggtcagccagttctttcaggtgatcctgaacgttgtggatgtccagcgggtaacttttcagcggggttttgctgttgataacttgagtggtccccagagctacaccgcccagctgcactgcacgttctgccatggtatccagatgatcgatcagtgcggtgcggaagccatccagcatttcatgtacggcaatgaagttagcgccgcgcatgttccagtgcgcttgtttggtaatcaaagaaagatcaataaactggataacctggcgattcagcaactctactgttgcttttttctcgctgtcggagacatcgttgcgggtataaagcagattggtcgcttttgatttaactaatttagcggtactcataatttcatatcctcttgatgttatgtcccagtaattaacgagactaagtatagcaccggctatgtgttccgctattctggctgttcctatcacactaatagtggtaacaagcgtgaaaaacaaaactaataaagattcaatgagttagatatattgataagaacaattcttatttatctgctcgccaggaattttcggaataaatatgcttttgcataattcgatatataaagacggtgtagaggaaaagtagcgagaaattctgcatggttatgcataaccatgcagaaatgtaaatttaattaatgtctaattcttttattttgctctctttgcgtactgtcagcgtagaccccattgaagcggcgatgatagcgccgagcgccagcagctgtatgggtgtcagtgtttctccgaggaaaatcatcccggaaacggcagccagcgccggttccatgctcatcagcgtaccaaatgtccgtgttggcaaacgggtgagggcaatcatttccagcgaataaggcagagcggtcgagagaatagcgacagccagacccaatggaataaccgaccagtgccagagtgcttcaccagcctgaagcgctccaattggcacgaaaattaacgctgcaatcaacgaaccaattgccaccgtcgcagggccatgttccgctcctgcgcgttgcccacttaaaatgtaaatagcccaacaagccccggcccccagtgccagcgcacagccggttaaatcgacatgggaaacgtcttgccccagcggtagcaggaaccacagaccaagaaccgccagcacaacccagacgaaatctaccgggcgacgagaagagaacagcgccaccgccagtggtccggtgaactccagcgccaccgcaatacccagcggtactgtctgaatagaaagataaaaaagataattcatcccacccagcgaaacgccgtaaaacaacagcggtaaccgttgctctttggcaaagcgcagtcgccatggcttaaagaacgcgatgaggatcagcgttcctaatgccagacgcagcgcagtgacacccggtgcgcccaccagaggaaaaagtgacttagctaacgaggctccaccctgaatagacgccatggcaacgagcaatatgattattggtaaccagaccggcattttacgtaatgaaccaggcatcctttctcccacaaatatctagacttaagtaaagcgtggagtgtactggatatacccaatgctggttgagcatttgttgaaaaaattttcccccgttttgactaaaatgcgccaggattgatggaatcattagtctggtgattaggaataatctggatgaatgacagggaaaacatgcgtaatacttacgcagttctctgaaaaagtgatttaaatttagatggatagcggtgtatggaaacgttctgttacatgaaatggcccgttagacatcacaaatcgcgaagagtttcccattaatttttgatatatttaaaacttaggacttatttgaatcacatttgaggtggttatgaaaaaaattgcatgtctttcagcactggccgcagttctggctttcaccgcaggtacttccgtagctgcgacttctaccgtaactggcggttacgcacagagcgacgctcagggccaaatgaacaaaatgggcggtttcaacctgaaataccgctatgaagaagacaacagcccgctgggtgtgatcggttctttcacttacaccgagaaaagccgtactgcaagctctggtgactacaacaaaaaccagtactacggcatcactgctggtccggcttaccgcattaacgactgggcaagcatctacggtgtagtgggtgtgggttatggtaaattccagaccactgaatacccgacctacaaacacgacaccagcgactacggtttctcctacggtgctggtctgcagttcaacccgatggaaaacgttgctctggacttctcttacgagcagagccgtattcgtagcgttgacgtaggcacctggattgccggtgttggttaccgcttctaatcactttggtgatataaaaaatccgcctctcggggcggatttttgtttttaaggcttcgggtcgaaaatatcggttccgagatggttgtaatccaccttctgtaactggaagttggtgatgtatatcgacccggctttcttctcagatataaacgggtatttgatgttaatttccttcgctttaattcccgtccactgggagaaaaaacctaagaagtcattggctgagcggcgggctttaatcacccgatgcgctttatcgtcgctggaaatgaccataaaaggcacctggaaattttgctgatacttatcatcatgggcaaggtattgcacgtctttgccgcgctctttaaaggccagaccgtggtcagaaaagtaaaccagcgagaagctgctgccgctgttgcgtaactgatcgtacagcttgcgcagtaaatcgtccgtttgcgtcatggtatagagatagcacgacgtttctttcgactgcacaaaggtttcgtatttgccttgtgtcctgtcgcaggcctgcggatgtgagcccatcagatgtagaacaatcagctgcggttgcgagtgctcttgcgccagcacttgagcggtcatatccagtaacgcttcgtctttggtatttttatctgcttcaaaattaccttctttcaggaagtacacttcatctgctcgtttggcgatgctggcgatagcggtatcgtattcgccgatttgaccctggttggaaaaccaccaggtctggaagcccgcgcgatttgccagggtgacaaagttatcctgaaactgtggtttgccatcgactacgcgattgagcgttaagccaagcgatttctgcgtggagccactggcggcaatgtagtcagcaaatatcaaaccgttaacgctgctggcaaacggggtattgtcccagtgaccgccaaaggcaccgagggcatcgcgacgcgcgctttcaccgatcaccaccacataggtctgatacttcggcttaacggcagtgaccgtccaggtatctttcattccggaaagttttgccatccgttcttgctcttcaatcacctcgttattattgacgatgacatccttagcaaaacgaaataccggatagccagtatctttcagtttaaatacgccgccccaggccaggttttgcacgggagcaacaaaaaatgtcgccacactgaataccagacacaggctgtcgaaggtattccagcgcgctttttcactctctttttttcgcctgattgctattacgccgagcacaaaaataaatatgccgaccatgtagctgtaccacggaaaaatcgtcaggatttcggtcgactcttccatattggtggagtgcaatgccagcaatgtattgaaattaggcgcgccgtaggcctgagcaaaagggaaataacaagccgccaccagcgaactgacaccgaccagaactttttgtacgcgaggcaatgttcgccatagcaaaagcaaaatagccgtaaacgcagcggtgtagagcaaactgaaggggtaacctaagccgaggttaattaatagcgactgtaaaaagtagaacgcagtccacgggctaaatacccggctacgggtaacaagcgattctttgagggttaaattcatatgccactatcgtaacaaacgccatgtgcttaccctggcgtcaagggtcaatacctgcaagagtgcgtgaagagtggaaaggggtccgcatccgcgagccgcaatatacgcagggctgcaagaagatagagcgagccgccgttcaggtcaactactgacgaacaaatcttttgcgaaggggattgcaaatccgacaaaaagtggggtttttcagaccaaaacgcgttatgcctgcatgaaagcaggagtgaagcggcgtaccgcgacgccgctatttatcggaaggtttatcttgctgcggtttgttgttgaccatatcgcacaacatagagagcagcattaaccgtactttaaagggagaatgactaaacacgcgcatacacctcttgaactcattcataagacctcctgacttgctaatcccgtcgatccttgagggatgattgcattacatacagatatagcacaggctatattatatagctattgctaaaacgttaattttttgtaccttcgcaactctggtttacaatgtgcgcacgaaatgagaacgctatgtatgcgtcaccataatgaggaagcacaatgagtcgtcgcgcaggtacgccaacagcaaaaaaagtgacgcagttagtgaacgtggaagagcacgttgaagggttccgccaggtcagagaggcgcatcggcgcgagcttattgatgattacgttgagctgatttctgacttgatcagggaagtgggggaagctcgtcaggtggacatggctgctcgtctgggagtttcgcaaccgacggtggctaaaatgcttaagcggctggcaaccatggggctgattgaaatgatcccctggcgtggcgtgtttttaacggcagaaggagagaagctggcgcaggaaagccgcgagcgacatcagatagtcgaaaatttcttgttggtgttgggcgtcagtccggaaatcgcccgtcgcgacgcggaaggcatggagcaccatgttagtgaagagacgctcgacgcttttcgtttgtttacccagaaacacggtgccaaatgagcctgccttttttacgcacgctgcaaggcgatcgtttttttcagttattaattcttgttggtatcggattaagctttttcgtgccctttgcaccgaaatcctggcctgctgctatcgactggcacaccatcatcaccttaagcggcctgatgctgctgaccaaaggtgtggagttaagcggttattttgatgtgctggggcgcaaaatggtgcgccgctttgctacggagcgtcggctggcgatgtttatggtgctggcggcggcgctgctttctacctttctgaccaacgatgtcgcgctgtttattgttgttccgctgactatcacgctaaaagactgtgtgagatcccggttaatcggctgattatttttgaggcgctggcagtcaacgctggttcgctactgacgccaattggcaacccgcaaaatattcttatctggggacgttctggtctttcgtttgccggatttattgcccaaatggcaccgctggctggcgcaatgatgctgacgctcctgctcctgtgctggtgttgtttccctggaaaggcgctgcaataccatacgggggtgcaaacaccggagtggaaaccgcggctggtgtggagttgtctggggctgtatatcgtctttctgacggcgctggagttcaaacaagagctgtggggactggtgattgtggcggcaggctttgcgctgctggcacgtcgcgtggtgctcagtgtggactggacgctgctgctggtgtttatggcgatgtttatcgacgtccatttactgacccagcttccagcgttgcaaggcgtgttgggtaacgtgagtcatctatctgaacccgggttatggttaacggcaatcggtttatcgcaggtgatcagtaacgtgccgagtaccatattgttgctgaactatgtgccgccgtctttattactggtatgggcggtaaacgtaggtggctttgggttattacccggatcgctggcaaatttgattgcgctacgtatggcgaacgatcgccgcatctggtggcgtttccatctctattcaataccgatgctgttgtgggcggcgttggtgggatatgttttgttagttatactcccggccaactagggtctggcaaataaaaaaggcggattatgagtccgccttttgctttaagttttgaagattaattcagacgaaccggcatcccggagcggtttttaatcgcttcatcaagaacaacctggtcaacatctggctgaccggtcactgtttgcacgctcttcgtcagggtaattggcacaatttcctgaccttcaaactgggcttcggtggtagacagcgggttatggacttcaatataacggctgccgtctggctcggtggtcgcttttaccggctcatcaataaactgtacgcgggtaccgaccggtactttctcgaacaggaatttgatgtcttcgttacgcagacgcacacaaccatgacttacacgcaggccgataccgaagttggcgttggtgccatggatagcgtacaggcgaccgatgtagagtgcatacagccccatcgggttatccggacctgccggaacgacagccggaagcggttcgcccgcagcgcggtactctgcgtgcattttggcggtcggcgtccaggtcgggcctgctttcttacgctcaactttagtggtccagttgataggcgtatctttgcctaactgaccaatgccgatcggcagcacgataacggtgttggtccctttcggatagtaatacagacgcatctctgcactgttaatgacgatgccttcatgaacggtatccggcaggatcagctgctgcggaatgttcagtacagtaccgcctttcggcaggaaggtatccacacccgggttcgcttccatcatattggaaagccccatctggtactccgcggcaaaatactccagcggctgagtgttaccttcaggaatggtgatcacctgattctgaccaaccaggcgactcccgtcggttggcagaggataagttaccgcagaggcggtactgcaaaagccgacaacagcgaaggccgctgcgaataatgttttcaatttcatattcatgttaagcgagattttgtgcctggcaggccattgggttgagaatattagagtattggaagcgcattataagttcattccagctcacagtgaaatcagatgtgtacgaaatcacattttttgcctttggcttgagtgtagaccttaagcgaggagcaggatcttctttcagacttatggcataatgcgcggtttgtcatatctcttttcaggatacgcctgtgttagtttccagtaacgtcaccatgcagttcggcagtaagccgttgtttgaaaacatttccgtcaaatttggcggcggcaaccgttacggcctgattggcgcgaacggtagtggtaaatccacctttatgaagatcctcggcggcgacttagagccgactttgggtaacgtttccctcgatcccaacgagcgcattggtaagctgcgtcaggatcagtttgcctttgaagagttcactgtgctggatacggtgatcatggggcataaagagttgtgggaagtgaagcaggagcgtgaccgcatctatgctttgccggaaatgagtgaggaagacggctataaagtggccgatctggaagttaaatacggcgaaatggacggttactctgcggaagctcgcgccggtgaattgttgcttggcgtgggaattccagtggaacagcactacggcccgatgagtgaagttgctcctggctggaagctgcgtgtgcttctggcgcaggcgctgtttgctgatccggatattctcctgctcgacgaaccgaccaataacctcgacatcgacaccattcgctggctggaacaggtgctgaacgagcgtgacagcaccatgatcatcatctcgcacgaccgtcacttccttaacatggtttgtacccacatggcggatctggattacggcgagctgcgcgtttatccgggcaactacgatgagtacatgacggcggcgacccaggcgcgtgaacgtctgctggctgataacgccaagaagaaagcgcagattgctgagctgcaatctttcgttagccgctttagcgccaacgcctcgaaatctcgccaggcaacttcgcgcgcgcgccagattgataaaatcaaactggaagaggtgaaagcctccagccgtcagaacccgttcatccgttttgaacaggataagaaactgttccgtaacgcgctggaagtggaaggtctgaccaaagggtttgataacggtccactgtttaaaaatctcaacttgctgctggaggtcggtgaaaaacttgcggtactgggtaccaacggcgtcggtaaatcaacgctgctgaaaacgctggtgggcgatctgcaaccggacagcggcaccgtaaaatggtctgaaaacgcgcgcattgggtactatgctcaggaccacgaatatgagtttgaaaatgatctgaccgtgttcgaatggatgagccagtggaagcaggaaggcgatgacgagcaggcggtacgcagcattctcggtcgtttgctgttcagccaggacgacatcaaaaagccagctaaagtgctttccggtggggaaaaagggcggatgctgtttggtaagttaatgatgcagaagccgaacattctgatcatggacgaaccgaccaaccacctggatatggaatccatcgagtcactgaacatggcgctggaactgtatcagggcacgctgatctttgtttcacacgaccgtgagttcgtaagctccctggcgacccgcattctggaaatcaccccggaacgcgtgatcgactttagcggtaattacgaagattacctgcgtagtaaagggatcgagtaagtgattatccgtcaccccgatactgtcggggtgacggcggctgatgacaaatgcaaaatagcctgatgcgctacgcttatcaggccttgtattatccctccagtgcagagaaaatcggccagttttctctgcctgcagtccgcatgccgtatcgggccttgggttctaacctgttgcgtagatttatgcagcggactgcctttctcccaaagtgataaaccggacagtatcatggaccggttttcccggtaatccgtatttgcaaggttggtttcactatggaacatgaacttcattatatcggtatcgacaccgctaaagagaaactggatgtcgatgtgttgcgtcctgatggtcgtcatcgcaccaaaaaattcgctaacaccactaaagggcacgatgagctggtgagctggctgaaaggtcacaagattgaccatgcgcatatctgcatcgaagcgaccggcacctatatggaacctgtcgctgagtgcctttacgatgctggctacatagtgtcagtcattaatcctgcgctgggtaaagctttcgctcagagtgaaggactgcgtaacaagactgataccgtggatgcgcgcatgctggcagagttctgtcgtcagaagcgccctgcagcctgggaagcgcctcacccgcttgaacgcgcgttgcgtgccctggtagtccgccaccaggcgctgacagatatgcacacgcaggaactgaatcgcactgaaacggcgcgggaagtccagagaccgagcattgatgctcaccttctgtggcttgaagcagagctgaagcgtcttgagaagcagataaaagacctgacagacgatgatccggatatgaaacaccgcaggaaactgctggaaagcatcccgggtatcggagagaaaacatctgcggtattgctggcttatatcggtctgaaggaccgcttcgcccatgccagacagttcgccgcttttgcgggtctgacaccacggcgttatgaatcaggtagcagtgtgagaggggcgagccggatgagtaaggccggacatgtgtcgcttcgcagggcgttgtatatgcccgcaatggtagccaccagtaagactgagtggggacggcgttccgcgaccgtctggcggctaatggcaag

SEQ ID NO: 118 - DNA, 175797 bp, Escherichia coli
aggaaaggtgattctcggcgcgatgatgcgcaagctggcacaggtggcgtatggagtgctgaagtcaggcgtgccgttcgatgcgtcacggcataatccggtagcggcgtaaaaatcgcggaagggatgaaaaaacagcgcctgacggcgctgtgtctggcatgcctgcaatccgggaaaccggaccaggaaaaaacttgcaggccataacagtatctacgcagtacctgtaatatattgaatctgcaggactttgtaggccagataagcgtagcgcatcaggcattaagaaagcgcacttgtcagcaatctgagtaacgtcgaatcgattttcttaatcccacatcaattcacttccattaactctcaaacatccatgcccaacgctcgcttaccgtgaatgttgaggtcggcaagcgtaaagcgtccttcccagtttgtttcatagtcctcgcgcgggaagtcgcccggcgatgcgcctttttccagtgcggccttcaccttgtgcgcgtaggcaagatttttctcgcacatcggtgccgcaggaatgtacatcacgttgccccaaccctgttgattttcaacgggggcaacggaatggatgacgtcgcagtgccaccagacggagtctccggcctcgagttttggaatgctggttaacgcctcaattaacagtggatgccattgctctgataccggcaacactcttccgggcgctacgccgcacagttcatcctccggcacatcatcaagcagcggacgtaacagtacgtacgccatggcttcaggaatgggcacaacgtgcagcaacccctgaccaggcagcatatcagagagcgctgtccagccctggaatgtccgaaacacggaacatttggtggtgttgtccaccgtgtactcttcaacttccgtacgatgtgccgcatgccagggatcatattgcgccagattgccattaaagacgttggcgaaaacgcgctgatacgctggaagcagccagcgttccagcgccccggagtcggtatgcgctccaagacctttggaggtcgttccgggcggacggcggcggatacggtcagggtagatgacgctcacatccgggttaaaccattgctttccatcactttcaaatgtccacagacgattgagaaacgactgcgcattcgccatttcttcactctggcgggcctgcatttgcgcctgcgaccagtagatggggtaaatctcgggacgtgaagcgctgagcgtcccgaagaaattatcgccggggcctttgtagacctcgtcaaagcggttgcggtccagatagtccagcatcgactgatcccagcctagcgcttgttcgcgggggaaatggccttttatcaccgcacaaccgcgacgtttaatctgttcgcgctgctctgcagtaacatgacctgctttgatatcggcataagacagcaccggccagacggcatcgccctgtgctttgagtgcgttgatttcagccactcgcgtggcaatgtcatcgcttagctgattaaagatctgctggacgtcgccaagctgcgcccgcagcgcgtgcttcatctgacggatagctgctttgtgatcggcaggcaatgtgtcgctggtaaaagtagaagccataaccacctctcattaactttcattcaaaaccattctgatttgcatgtgacaatataagttataaataagttaatgcaagtttaatgatttgatgtgatgtacaggatgtaaaaagaagggaaaaccggagcgcacggctccggtagagaggtcagctgttaaaaggggatgtgttatccagcaccgcctgaatcacattcagcgcgccttcatgattattatcatcggtagcgtaacgggcgatttgtttaatgttttccgcagcattgcccatcgcaaaggaataacgcgccattttcagcatctccgcatcgttaccgctgtcgccaatcgctaccacattttgcggtgacagatcccagcgtttcagtaaccgcgaaataccgtttgctttatgtagaccgggaataatcaggtcgataaagccaaaaccactggtgacgggtttcataatgccatcgagcgctatgtgcagtttgtcgatcactaacgggatttgttcatctggcaggttgagcgaaaacttgaacagtacgtcgtcaatctcctgataatcttttacagctttcaggcgatggtagtgttttgccatcagtgcgacaaatgcttcggggcattttcgctgacatatgcactttgcagaccgcaggcgacaaaattgagttgcttatcttttagcaactcgccaataacaatccgcgattcatgtcgggtcagttcgccgtggaacagttgcttgccatgttcgtaaaccagtgcgccgttttccgcgacaaaagagatctcatcctttagctcaggaaagaacgaaataagctggtaatactgattaccgctggcgacaacgaactcaatgccgcgctttttcagttcctgatattgcgccataaaacgtggttggttgtacgttttggcgtcgttaagaaaagtaccgtccatgtctgtgacgataacttttacgctcataggtgtgctcctggctcgaaaatgaaaccgtaacagtgtaataacaatgtgacgcagagcacaaattatatttcgaatgaaagtaaggatggaattgattatgtgaatgatttagcccggcgacgccgcagccgggccgaagagattacagcatatgttcagtacgagcgatgatatcgtcctgagcgtctggagagagcgcggtgaagaaggcggaataacccgcgacacgcactaccagatcgcggtactgatccggatgttttttcgcctccagcagcgtttcgcgggaaacgatgttgtactgaatatgccagcctttatgcacctcgaagaaggtgcgcagcaggatcatcagtttctgcttgtcagattcgttctccagcgttgccggattcagtttctggttgagcaacacgccgccgagaatcgctgccgtaggcagtttacccaccgagccaatgaccgcagtagggccgagatggtcagtaccagaggccggactagcgccttctgccagcggggtgtgggctttacgcccgtccggtgttgccatagtttgcgcgccaaacggtacgttagcggagatagacgaggtacccgcgtaatagttgccgccaaccggaccacgaccgtagcgcgggttatggtactgtttcagttcgtcgatataggtctgataagcgcgagccagcagcgtatcgacggtatcatcgtcgttgccgtacttcggcgcaccgttaatcagccgctgacgcagttgctcatgagtcaggccatcgaagtcatccgccagtgcggcagccagctgttgctgaccaatcgcgccctgttcaaataccagtttcttcactgccgccaggctgttgccgaggttggcaatgccaacctgcaggccagaaacccagtcatatttcgcgccgccttgcttgatacttttcgctcgctcaatacagtcatccaccagcgccgagcagagaatatcgtgtacgttctcttccagcatggtgtcgacgacatattcgatttcgattgatttacgcgtgtaataacggatttgcgtatcccacgcgtccattacttcatcgaaattgttaaagttgcctgccgacaacgctttttcttgtggcaggaacactttgccgctggtggcatcacgcccgccttccagcgccgccagcatcacgcgggcgaagttgataaagctcatgccggtacagcgatagccccatttgccaccgacggcggtttcgatacaaccaatcgctgcgtagtcgtaagcgtcctgcggttcaataccgagtttaataaattccgggatcacgatttcgtcgttgttgaacgccggcatcccgaagccgcaacggatcacctgtacgcaggcgtcgaggaaatcattactcattcctgcatggtaacgcacgctgaggttaggctgagtggaacgcaggcgaccgcaggattcgaggatcgcgtaagagaggggattcactgcatccattggttgaccatcaaccagattttgtccgccaatggtaacgttctgatacagcggacttcccgcagaggcttttgagtgtgagccggagcggatcttgttcacttccagcagtttcagccagcagctatgcagcatctcgatggcgtgttcgcgatccagcgtctggttgagttcaacgtcgcggcgatagtacgggtagagatactggtccatacgaccaaacgataccgagtgaccgttagattcgatctgcaaaatcaattggatgaagtaacacagttgcagcgcctgccagaaagtctgcggcggctggtgggcgataagatcgcagttttctgccatcgtcagcagttcatcgcgacggctttcgcgagtttcggtagcagccatttcacgcgccagggcagcgaaacgttcaatgtgttcactgactgccaccagcacgatatcaatcgctttcaggaattgttcgccatgtaaaccttccagcaccgtcagattgatgcgcgagcgacgttccgctactttctcacgcagaccatcaagacctttttccagcagcagcgggaaattcaccgccaggtgcgcatcgccggaggtcatattgccttccgctttaatgattccggtcgccagcagacctttttgctcatcggtaaacatgccgtagcagcgatcctgtacggtctgaccgcgccaccacgggcacacttcatgcagaacgcgtttgttctcttcgctcaccgcaaagccagcaccgggacgatctgccagatcatcaatctctttttcgatccacgagacagtatattccgggaagatcggcgcggcgcgaacttcgcttgcctggttgccaatgatcaactcatcgtgtttgatccagatggtgcgattcgccaggtgatgcgccagtgccagcgcgcgacgtaccgggatcggcttatcgagatgttgttgatacatctcggtatagtgctgcgcgcgctcggtacagactggcggtttcacaatatgcaccagcgcatttttgtgcgctttaatgcggtcgctgagcgtgtccagtttcagtgtggtcatggttgttatcctcgtaaggtcgcggttaaccctttctggcaggcatactgctgggcaaaatcgagcagctctggcgcatcaagcggtttttccggggcgtcatagggcagattaagtaagtgatatttgttgatgcccagcgtgtggtagggcaggaaatgaatttcgccaacgtgcagctcgtcggcggcaaaatcggtaatggctttcacagaggtttcgtcggcattaaagccctgaatcagcggcacgcggataatgatttttttgcccgctgcggcgagttttttcaggttatccagcaccctggcggcgttaccgtcggtccactgtttaaacggcgcgtcggcaacgtgttttaaatcggcaagaaacagatcgatatagggcagagaaggggcgatatatttccacggcacatgcagacaggtttctaccgcagtatgaatgccggcctcgtggctggcttgcagtagcgccatcgccatttccggctgcataaagggttcaccacccgaaagcgttaaaccgccgccgctgcgatcgtaaaacggtttatcgcgcagaacggtcgtcatgatctcctcaacgcttttcacttcaccacacacggttaatgcctgtgtcggacagcagtcggttaacgccgtcagatgctccggggttaacttttcccgatgaataagcaaaccattcagcgcgcgctcaatcacttccggcgcggccttagcgcacagctcgcagccttccagacacagtcgtgggtcatacagcagatcctgcgtgcgggcgcggctttccgggttctgacaccagcggcagcccagcgaacagcctttaagaaatacgaccgtgcggataccggggccatcatgggtcgagtagcgctgaatattgaaaatcatagttgcctctctgtttcgttcaaacattaaaatactttcgaatgaaagttagattgatgtgcgtcaactgttcagagagttttcccgtgatagtctacattcagacaaaaagtacattttgaggatggttatggaactgtatctggatacttcagacgttgttgcggtgaaggcgctgtcacgtatttttccgctggcgggtgtgaccactaacccaagcattatcgccgcgggtaaaaaaccgctggaggttgtgcttccggaacttcatgaagcgatgggcggtcaggggcgtctgtttgcccaggtaatggctaccactgctgaagggatggtgaatgacgcacgtaaattgcgctctattattgcggatatcgtggtgaaagttccggtgaccgccgaggggctggcaactattaagatgttaaaagcggaagggattccgacgctgggaaccgcggtatatggtgcggcacaagggttgctgtcggcgctggcaggtgcggaatatgttgcgccttacgttaatcgtattgatgctcagggcggtagcggtattcagactgtgaccgacttacaccagttattgaaaatgcatgcgccgcaggcgaaagtgctggcagcgagtttcaaaaccccgcgtcaggctctggactgcttactggcaggatgtgaatcaattacgctgccgctggatgtggcgcagcagatgattagctatccggcggttgatgccgctgtggcgaagtttgagcaggactggcagggagcgtttggcagaacgtcgatttaaccggacgttctgcatcctcataaattgctgatgacgtggcggagtgcaccgatgcctgccacgtcttatcaggcctggaggtggcaattactgcccgcacacctcacaccccggattacgcatcagtttcatttcgcgaaactgacaggtcatcgcatcgtacatgacgattttcccgctggccggtttgccataacctgccagcagcttgatcgcttccattgcctgcaacgaaccaatcacgccaatcaacggtgccattacgcctgcttccacgcaggttaatgcattttcaccaaacaaacggctgaggcagcggtagcatggttcaccgtcctgataagtgaagaccgtgatttgaccttccatacgaattgccgcgccggaaaccagcggtaccttcgcggcaaaacagcctgcgttcagttgattacgtaccgcaacgttatccgtacagtcgagcaccagatcgtgttcagcaatcatcgcagcaagttcagcgtcatccagcagtgcattgactggcgtaatcgcaatatgcgggttgatccgcgccagggcgtcacgtgcggattcaaccttaggttgcccgaccgtggcatcactgtgcagcgtctggcgttgcagattcgagagcgaaaccgtgtcgaagtcgagcagcgtcaggttgccgacaccggcgcttgccagatactgcgaggctgcgcagccgagtccaccgaggccgacgaccagcacacgagaatcttttagcgcctcctgaccgtcaaaatcaaaaccgcgcagaatgatttgccggttgtagcgcagcatctcctgatcgctgagttccgccattacaggcctccgaacaacgcgttaaatggttctacttccacccattcgcccacgtccacattgccgcgatcgcgttccagcacgataaagcagttgccgaggctaaaggagctaaatatatgtgaaccctgatgtccggtggtcgtcacttccagttcgccatcggcgttgcgttgcagcacgccgcgctggaaatcaaggcgacctggcgtttttttcaggcgggacgctgtgcgtacgcgctggcgcgcgggcaggccgctggcggtgttaccgcttaattttgccagcaaaggctgtaccagttgatagaaggtcagcgtcgctgaaaccgggttgcccggcaggccgcagaaccagctattagaaagtttaccgaacgcgaacggtttacccggtttaatcgccagcttccagaaggcgatctcccccagctcttcaagaatggttttggtgtaatccgcttcacccactgaaacaccgccggaactgatcaccacatccgcctggctgtcggcttcaataaatgcggcgcgcagggcatgtggatcgtcgcggataatccctaagttgattacctcgcatcccaactgttctaacatcaggtgtacggcgagacggttggtatcgtagatttggccatcgcccagtggctgaccgggcaactggagttcatcaccggtagaaaaaagcgctacacgcactttacgaatcaccggaacttcggcaatccccagtgaagcaatcactggcagttcagcggtagtcaggcgagttcccgccgggaaaacaaccgcacctgcagagatatcttcaccgcgacggcgaatattttgcccgctacgcacttcagcagtaaaacgcacgccattgtccgtttgttcagtctgctcctgcatcaccaccgcttcgcagccttccggcaccggcgcaccggtcataatacgaatgcaggtacccgcaggccattcaccatggtacggctgaccggcaaaggatttaccggcaacgggcagcggttgcctggaggcaatatcggctaaacgcaccgcgtagccgtccattgcggagttatcaaaccccggaacatcaagcggcgaaacgacatcgctcgccagaatacgaccaaaacactgtaccagtggcagcgtttcctgggcggtcagtggggtgacgcgagaaagcatctcattaagcgcggtgtcgagcgacatcaatccggtggtaaattccatgaaaacactcctgcggaggcaaaatcgaatttgcctattatgtcagaaaaacgccacagactgtatgccacctcgggcgtagcgctgggtcctgcctttacatgccatatccatctttctatattcaaaaattgaatgagtaattcataaaaattctgatatttatagcaaaagtggcgagccacccttaatggacgaatactatgggcaaagcagtcattgcaattcatggtggcgcaggtgcaattagccgcgcgcagatgagtctgcaacaggaattacgctacattgaggcgttgtctgccattgttgaaaccgggcagaaaatgctggaagcgggcgaaagtgcgctggatgtggtgacggaagcggtgcgtctgctggaagagtgtccactgtttaacgccggaattggcgctgtctttacgcgtgatgaaacccatgaactggacgcctgtgtgatggatggtaacaccctgaaagccggtgcggtggcgggcgttagtcatctgcgtaatccggttcttgccgcccggctggtgatggagcaaagcccgcatgtgatgatgattggcgaaggggcagaaaattttgcgtttgctcgtggcatggagcgcgtctcgccggagattttctccacgcctttgcgttatgaacaactactggcagcgcgcaaggaaggggcaaccgtcctcgaccatagcggtgcgccactggatgaaaaacagaaaatgggcaccgtgggggccgtggcgttggatttagacggcaatttggcggcagccacgtccacaggcggaatgaccaataaattacccggacgagttggcgatagtcccttagtgggtgccggatgctacgccaataacgccagtgtggcggtttcttgtaccggcacgggcgaagtcttcatccgcgcgctggcggcatatgacatcgccgcgttaatggattacggcggattaagtctcgcggaagcctgcgagcgggtagtaatggaaaaactccctgcgcttggcggtagcggtggcttaatcgctatcgaccatgaagggaatgtcgcgctaccgtttaacaccgaaggaatgtatcgcgcctggggctacgcaggcgatacgccaaccaccggtatctaccgtgaaaaaggggacaccgttgccacacagtgatgaacttgatgccggtaatgtgctggcggttgaaaatctgaatattgcctttatgcaggaccagcagaaaatagctgcggtccgcaatctctcttttagtctgcaacgcggtgagacgctggcaattgttggcgaatccggctccggtaagtcagtgactgcgttggcattgatgcgcctgttggaacaggcgggcggtttagtacagtgcgataaaatgctgttgcagcggcgcagtcgcgaagtgattgaacttagcgagcagagcgctgcacaaatgcgccatgttcgcggtgcggatatggcgatgatatttcaggagccgatgacatcgctgaacccggtatttactgtgggtgaacagattgccgaatcaattcgtctgcatcagaacgccagtcgtgaagaagcgatggtcgaggcgaagcggatgctggatcaggtacgcattcctgaggcacaaaccattctttcacgttatccgcatcaactctctggcgggatgcgccagcgagtgatgattgcgatggcgctgtcatgccgcccggcggtgctgattgccgatgagccaaccaccgcgctggatgtcactattcaggcgcagatcctgcaattaatcaaagtattgcaaaaagagatgtcgatgggcgttatctttatcactcacgatatgggcgtggtggcagagattgccgatcgggtactggtgatgtatcagggcgaggcggtggaaacgggtaccgtcgaacagatttttcatgcaccgcaacatccttacacccgtgcgctgttagctgctgttccgcaacttggtgcgatgaaagggttagattatccccgacgtttcccgttgatatcgcttgaacatccagcgaaacaggccccccccatcgagcagaaaacggtggtggatggcgaacctgttttacgagtgcgtaatcttgtcacccgtttccctttgcgcagcggtttgttgaatcgcgtaacgcgggaagtgcatgccgttgagaaagtcagttttgatctctggcctggcgaaacgctatcgctggtgggcgagtctggcagcggtaaatccactaccgggcgggcgttgctgcgcctggtcgaatcgcagggcggcgaaattatctttaacggtcagagaatcgataccttgtcacccggcaaacttcaggcattgcgccgggatattcagtttatttttcaggacccttacgcttcgctggacccacgtcagaccatcggtgattcgattatcgaaccgctgcgtgtacacggtttattgccaggtaaagacgcggctgcacgcgttgcgtggttgctggagcgcgtgggcctgttacctgaacatgcctggcgttacccgcatgagttttccggcggtcagcgccagcgcatctgcattgctcgcgcgttggcattgaatccaaaagtgatcattgccgacgaagccgtttcggcgctggatgtttctattcgcgggcagattatcaacttgttgctcgatctccagcgtgatttcggcattgcgtatctgtttatctcccacgatatggccgtggtagagcggattagtcatcgtgtggcggtgatgtatctcggacaaattgttgaaattggtccacggcgcgcggtcttcgaaaacccgcagcatccttatacgcgtaaattactggcggcagttccggtcgctgaaccgtcccgacaacgaccgcagcgtgtactgctgtcggacgatcttcccagcaatattcatctgcgtggcgaagaggtggcagccgtctcgttgcaatgcgtcgggccggggcattacgtcgcacaaccacaatcagaatacgcattcatgcgtagataacattcaggcggagaataaaatggcaagagctgtacaccgtagtgggttagtggcgttgggcattgcgacagcgttgatggcatcttgtgcattcgctgccaaagatgtggtggtggcggtaggatcgaatttcaccacgctcgatccgtatgacgcaaatgacacgttatctcaggccgtagcgaaatcgttttaccaggggctgttcggtctggataaagagatgaaactgaaaaacgtgctggcggagagttataccgtttccgatgacggcattacttacatcgtgaaattgcgggaaggaattaaattccaggatggcaccgatttcaacgcagtggcggtaaaagcgaatctggaccgggccagcgatccggcgaatcatcttaaacgctataacctgtataagaatattgccaaaacggaggcgatcgatccgacaacggtaaagattaccctcaaacagccgttctcagcgtttattaatattcttgcccatccggcgaccgcgatgatttcaccggcagcgctggaaaaatatggcaaggagattggttttcatccggtgggaaccggaccgtatgaactggatacctggaatcagaccgattttgtgaaggtgaaaaaattcgcgggttactggcagcctggattgcccaaactggacagcataacctggcgtccggtggcggataacaacacccgcgcggcaatgctgcaaaccggtgaagcgcagtttgctttccccattccctacgagcaggccacactgctggagaaaaacaaaaatatcgagttgatggccagtccgtcaattatgcagcgttatatcagtatgaacgtgacgcaaaagccgttcgataacccgaaggtccgtgaggcgctgaattacgccattaaccgtccggcgctggtgaaagttgcctttgcgggctatgcaacgccagctactggtgtggtaccgccaagtatcgcctacgcgcaaagttataaaccgtggccttacgatccagtgaaagcgcgcgaattactgaaagaggcgggatatcccaacggtttcagtaccacgctgtggtcgtcacataaccacagcaccgcgcagaaagtgctgcaatttacccagcagcagttagcgcaggtcgggattaaagcccaggtgactgcgatggatgccggacagcgggcggcagaagttgaaggtaaagggcaaaaagagagcggcgtgcggatgttctacactggctggtcggcttcaaccggcgaagccgactgggcactatcgccgttgtttgcctcgcaaaactggccaccgacgctgtttaataccgcgttttacagcaataaacaggtggatgacttcctggctcaggcactgaaaactaatgatccggcggaaaagacccgcttgtataaggcggcgcaggatatcatctggcaagagtcgccgtggatcccgctggtggtagaaaaactggtgtcggcacacagtaaaacctgaccggtttttggatcatgccagacaccggcttcagctttgaagacgcggatttgcaataagcaacgcagggagtggaatgcttaattacgttatcaaacgattactggggttgattccgacgctgtttatcgtttcggtgctggtgtttttatttgtgcatatgctgcccggcgatccggcgcgattgattgccgggcccgaagctgatgcgcaggttatagaactggtgcgtcagcagctggggttggatcagccgctgtatcaccagttctggcactatatcagcaatgctgtgcagggggattttggcctgtcgatggtgtcgcgtcgtccggttgccgatgagattgccagccgctttatgccaacgctgtggctgaccataaccagtatggtctgggcggtgatatttggtatggcggcgggaattatcgccgccgtctggcgtaatcgttggccggatcgattgagtatgaccattgcggtgtcggggatctcgtttccggcatttgcgctggggatgcttttaattcaggtattctccgttgaactgggctggctgcctaccgtgggagcagacagttggcagcactacattttaccctccctgacgctcggcgcggcagtggcagccgtgatggcgcgatttacccgcgcgtcgtttgtcgatgttttaagcgaagattatatgcgtaccgcgagggcgaaaggggtgagcgaaacctgggttgtcctcaaacacgggctacgtaacgcgatgatcccggtagtgaccatgatgggcttacagtttggcttttgctcggtggttctatcgtggtggagaaagttttcaactggcccggacttggacgcttactcgttgactccgtagaaatgcgcgattacccggtgattcaggcggaaattctgcttttctcgctggaatttattcttatcaacttagtggtggatgtgctttacgccgccattaacccggctatcaggtacaagtaaggatgcgactatttaactggcgacgtcaggcggtgttaaacgccatgccactggtcaaacctgaccaggtgcgtacaccgtggcatgaattctggcgacgatttcgccgtcagcatatggcgatgaccgccgcattattcgttattttattgattgtggtggccatttttgcacgctggatcgctccctatgacgccgaaaattattttgattatgacaatctgaataacggaccttctttgcagcactggtttggcgtcgattcactggggcgcgacattttcagccgtgtcctggttggtgcgcaaatctcgctggcggcgggcgtgtttgccgtgtttatcggtgcggcgatagggacgttgctgggcttgctggctggatattatgaaggctggtgggatcggctgatcatgcgcatttgcgatgtgctgtttgccttcccgggtattttactggcgatcgctgttgttgcggtgttgggaagcggcattgctaacgtgattatcgcagtcgccattttttccatccccgcgtttgcccgcctggtgcgcggcaacacgctggtgttgaaacagcaaacctttattgagtcagcacgcagtattggtgccagcgatatgaccattttattgcgtcatatcttgcctgggaccgtctcgtctatcgtggtgtttttcaccatgcgcattggcacctcgattatctctgccgccagcctgtcatttctcggcctcggtgcgcagccgccgacaccagagtggggagcaatgctcaatgaggcacgagcggatatggttatcgcgccgcatgtcgctgtttttccggccctggctatttttctgaccgtactggcgttcaatttgttgggcgatggtttacgcgatgcgctggatccgaaaattaaaggatagttacgtttgaatattgcttgaaagggtaatcacctcacaggcaattattgccctaagcaagtgttgtaactttctgctgattttgtagaatcgggtaatttggttaaaaagccgcagcaagggactatttttgcagcggcacagcgttcagatagttattttgttaaatgtattaacatgctgagtttatacgaaaagataaagataaggctgataattttatttttattggcagcactgtcatttattggtctttttttcatcattaactatcaactggtatcggaacgcgcggtaaaacgtgccgatagccgctttgaacttattcagaaaaacgttggctatttctttaaagatattgaacgttcggccctgacattaaaggactcactgtatttattaaaaaatacagaggagattcaacgcgccgtgattctgaaaatggaaatgatgccatttttagactcggtgggactggtacttgatgataataaatattatctcttttcacggagggcgaatgataaaatcgttgtttatcatcaggaacaagtaaatggaccgcttgtcgacgagtcagggcgggttatttttgccgattttaacccatcgaaacgaccgtggtcggtggcttcagatgactctaacaacagctggaatccggcatacaattgctttgatcgtccgggtaaaaaatgtatctcttttacgctacgtatcaacggcaaagatcacgatttgttagcggtagataaaattcatgtcgatttaaactggcggtatctgaacgagtatcttgatcaaatcagcgctaatgatgaagttctatttttgaaacaaggtcatgagatcattgccaagaatcaactcgctcgtgaaaaactgattatttataatagcgaaggtaattataatattattgattctgtcgatacggagtatattgcaaagacatcagcagtgccaaataatgcattgttcgaaatctatttttattatcctggcggtaatttattgaacgcatcagataaacttttttatctaccgtttgcgttcattattatcgtgttgctggtggtatatttcatgaccactcgtgtgttccgtcggcaattttctgaaatgaccgagctggttaatacgctggcgtttttgcccgactcaacggatcagatcgaggctctgaaaattcgcgaaggcgatgcgaaagagattatcagcatcaaaaattcgatcgcggaaatgaaagatgccgaaattgaacggtcaaataaattgctctcactgatctcttacgatcaggaaagcggttttattaaaaatatggcgattattgagtccaacaataatcagtatctggctgtggggatcatcaaactgtgtggtctggaagccgtggaagcggtgtttggtgttgatgaacgcaataaaatcgtcaggaaattgtgtcagcgaattgccgagaaatatgcgcaatgctgcgatatcgtgacattcaatgccgatctctatttacttctgtgtcgggaaaatgtacagacatttacccgtaaaatagcgatggtaaacgattttgacagcagctttggctaccgcaatctgcgcatccataagtctgccatttgtgaacctttgcagggggaaaacgcctggagttacgcagaaaaactgaaactggcgatttccagtatccgtgaccatatgttctccgagtttattttctgtgatgacgcgaaactcaatgaaatagaagagaatatctggattgcgcgtaatattcgccatgcaatggaaattggcgaactattcctcgtctatcaaccgatcgttgatattaacacccgcgccattctgggcgcggaggcgttgtgccgttgggtttctgcggagcgggggatcatttcaccgctgaagttcattaccattgctgaagatatcgggtttatcaatgagctgggttatcagattattaaaacggcaatgggtgaattcagacattttagtcagcgtgcgtcgctgaaggatgatttcttactgcatattaatgtttcgccctggcagttaaacgaaccgcactttcatgagcgttttaccaccatcatgaaagaaaatggcctgaaggcgaacagcctctgtgttgagatcactgaaaccgtgatcgagcgaattaatgaacatttttatctcaatattgaacaactgcgtaaacaaggggtacggatatcgattgatgactttggcaccggtttgtcaaacctgaaacgtttttatgaaattaatccagacagcataaaggtggactcgcaatttaccggcgatattttcggtactgcgggaaaaattgtgcgcattattttcgatctggcacgctataaccggatcccggtgattgcggaaggcgtagagagcgaagacgttgcgcgcgaattaattaaattaggatgtgttcaggctcaggggtatctgtaccagaaacccatgccattctccgcctgggataaaagtggaaaattagtaaaagagtagtttacgtatgtccagaatcaataagttcgtacttacagtcagtctgctgatttttatcatgatttcagcagttgcctgcgggatctacactcaaatggtaaaggaacgggtgtatagcctgaaacagtccgttattgatactgcttttgcggtggcaaatattgctgaatatcggcgtagcgtggcaattgatcttatcaatacgctaaatcccacggaggaacagctgttggttggcttacgcacagcttacgctgactcggtttcaccctcttacttgtacgatgtcggtccttatctgatttccagtgacgaatgtattcaggtaaaggagttcgagaaaaattattgtgcagatattatgcaggttgtgaagtatcgacatgtcaaaaatacagggtttatctcttttgacggtaaaaccatcgtctattacctctatccggtaactcacaatcgtagtctgatatttttgcttggtctggagcgtttttctttactgtcaaaatcgctggcgatggacagcgagaacctgatgttctctctgtttaagaacggtaaaccggtgaccggtgatgaatataatgctaaaaacgccatcttcaccgtttcggaagcgatggagcacttcgcctatttgccgaccggattgtatgtatttgcgtataaaaaagatgtttatttgcgggtttgtacattgattattttctttgccgcattggtggcagtgatatcgggtgccagttgcctctatctggtacgcagagtgattaatcgtggtattgtggagaaagaagccatcattaataaccattttgaacgcgtactggatggcgggcttttcttttcggctgccgatgtcaaaaaactctacagtatgtataactcggcgttcctggacgacctgaccaaagcaatgggcagaaaatcctttgacgaagatttaaaagcgctgccggaaaaaggcggttatttgtgcctgtttgacgtcgataaattcaaaaacattaacgacaccttcggtcatttgctgggcgatgaagtgttgatgaaagtggtgaaaatccttaaatcacagatcccggtagataaaggtaaagtctaccgcttcggcggtgacgaatttgcggtgatttatacgggtggaacgctggaagagttgctatcgattctaaaagaaatcgttcatttccaggtgggaagcattaatttaagtaccagtatcggtgtagcacattcaaatgaatgtcctaccgtcgaacgcttgaaaatgctggcggatgagcggctgtataagagtaagaaaaacggcagggcacagattagctggcagtaatcattattcgcaggccggacaaatgattttgcccggcctgaattaattaaacccggctaccccacaaatcgtactcatcggcgtgctcgactttcacacgcaggatatcacccggcttaacgttggtttcaccattgagataaaccgcgccgtcgatttccggtgcatctgccatgctgcgaccaattgcgccttcttcgtccacttcgtcgataatcaccagaatttcacggcccactttctcttgcaggcgctcggcggaaatctgctgctgcagctgcatgaaacggttccagcgttcttctttcacttcttccggaacctggtcaggcagggcattggcgtctgcaccttcaaccgggctgtatttaaagcagccaacgcgatccagacgcgcttctttcaggaagtcgagtagcatctggaaatcttcttctgtctcgccagggaagccgacaataaaggttgagcgtagggtcagttccgggcagatttcgcgccactgtttgatgcgcgccagttggcgatctacagaacccggacgcttcatcagtttgagaatgcgcgggctggcgtgctgcaacggaatgtccagatacggcaggattttgccttctgccatcagtgggatgacgtcgtccacatgcggataagggtaaacgtagtgcagacgtgtccagatccccagtttcgataactgttcgcacaggctgaccatgctggtttttaccggctcgccgttgtggaagccagtacgatgtttaacatcaacgccataggcggaagtatcctgcgagatcaccagaatctctttaacgcccgcatctaccagacgtttcgcttcacttaacacttcgccaatcggacggctcaccaggtcgccgcgcatagacggaataatgcagaaggtgcagcggtgattacagccttctgaaattttcagataggcataatgacgcggtgtcagtttcacaccttgttctggcaccaggctcaggaatgggttgtgtttcggttttggcacgtagtgatgaacgtgctccagaacctgctcatagctatgaggcccggtgatttccagcactttcgggtggacttcgcggatctgatcttcttttgcccccagacaaccggtcacaattaccttgccgttttcattcaacgcttcaccaatggcttccagtgattcttgtaccgcgctgtcaataaagccgcaggtgttgacgatcaccatgtccgcatcgtcatagctcggtaccacgtcataaccttcagtgcgtagttcggtgagaatacgctctgaatcgacaaggtttttcggacagccaagggaaacaaagccgattttcggctggggagttactttgctcatagcttaaaaaatattcagttacaggaaaggtcagggcagggattctacagagttctggataaaatttgtatcgcaatctcattcgctggcggaggcgaaggaaatgtaaattttgttaatttggcgtgaagaattgatcctggacagcattttgctcaaaaaatagccatactatttaattgcaacaaggctggaaagaggaggatcgaagtatgttcgttgacagacagcgaatcgatctgctgaaccggttgatcgacgcacgcgttgacctcgccgcatacgtgcaactgaggaaggcaaaaggatacatgtccgtcagcgaaagcaatcatctacgagataacttttttaaactgaatcgcgaactgcacgataaatcgctgcggttgaatcttcatctggatcaggaagagtggagtgctcttcatcatgctgaagaagcattagcgacagccgcagtatgtttgatgagtgggcaccatgattgcccgactgttattaccgtcaacgccgataagcttgaaaattgtctgatgagcttaacgctgagtatccagagcctgcagaagcacgccatgcttgagaaggcctgaaaactaagggggagaaagcgtctcccccttcatgtttaagtttttgtaaaaatgaatttgttatctcctccactgactacgctttaagccagagtcaatccggaggcgttatgcatcgacaatcctttttccttgtgccccttatttgtctttcttccgctctctgggcggctcctgcaacggtaaatgtcgaagtactgcaagacaaactcgaccatccctgggcactggcctttttacccgataatcacggtatgttaatcactctgcgcggcggcgagttgcgtcactggcaagtaggaaaaggattatctgcgccgctttccggagttccggacgtttgggcgcacgggcagggcggcctgctggacgtggttttagcgcctgattttgctcagtctcgccgcatctggttaagttattccgaagttggcgatgatggcaaagccggaactgctgtgggttatggccgcttaagtgatgatctctcaaaagtgaccgacttccgcaccgtcttccgccagatgccaaaactgtctaccggcaaccattttggcgggcggctggtattcgacggtaaaggttatctttttattgctctgggcgaaaacaatcagcgcccgacggcgcaggatctggataaattacagggcaaactggtgcgtctgaccgaccagggcgaaatcccggatgataatccttttataaaggaatccggtgcgcgcgccgagatctggtcttatggcattcgtaatccgcaaggaatggcgatgaatccgtggagtaatgcactgtggctgaatgaacatggcccgcgcggtggtgatgaaattaatatcccgcaaaaaggcaaaaactacggctggccgctggcaacctggggaatcaactattcaggctttaagataccggaagcgaaaggggagatcgtcgccgggaccgagcaacctgttttttactggaaagattcgcccgctgtgagcggcatggccttctataacagcgataaattcccccagtggcagcaaaaattatttataggcgcgctgaaagataaagatgtcattgtgatgagcgtcaacggcgacaaagtgacagaagatggccgtattttaacggacagagggcagcgaattcgtgatgttcgctctggacccgacggttatttatacgttctcaccgacgagtccagtggggaattacttaaagttagcccacgcaattagctaacgggaatcatcaccactttgcgcactgcggggcgttcagtgagttgctgataccagcgttgcagatttggacgcggtgtccaggtcaggccaacgttaaacaaattgtagatgaacggtgcgatagcgatatcgcccacaccaaactcgtcgccagagaaccattttacttttgccagttccgcatcgagcagggcaaacagggcgtcgcactctttgcaactggcatcaatggcggcctgatcgcgctcttccggtggtgttctgactaatcccatcaggatcccgcgatgagcattactgagcgtctggtttgcccagtccatccatttttccgcttccgcacgacgtgccggtgagtcgatccacaggcgtttttgcccgtactgtgccgccagatagcggacaatggcgtttgattcccaaagaatgagatcactttcgtcgtcacgcaacaacggcaccagcccgttagggttcatcgccagaaaatcagcatcgtgatttatcccaaactcacggcccgcgagaatttgctcataaggtagttccagttcttcgagcgtcagcaatactttttttacgttggttgaattattccgaccccacagcgtaatcatactcaccccttttccgacaggcagccacaggctgaacaggactccgatggtgaagtaaagttaacttttaagcaacagctggcaaaaaaatgacaccagaagcagcgaagcggcaggatattgcataaactttaaaaactttaccaacttacggtttctttaagtttgtgtgtgcgttattaatcaccgaacttatcatacggcgatataacgtattttttttgaatggatactcgggtggcatttatgacgcaatactcctctctccttcgtggtcttgcagcgggttctgcatttttattcctttttgccccaacggcattcgcggcggaacaaaccgttgaagcgccgagcgtggatgcgcgtgcatggattttaatggattacgccagcggtaaagtgctggcagaaggcaacgcggatgagaaactggatcccgcgagcctgactaaaatcatgaccagctatgtggttgggcaggcgcttaaggccgataagattaaactcaccgatatggtgacggtcggtaaagatgcctgggcgacgggaaatccggcactgcgtggttcatcggtaatgttcctcaaaccgggcgatcaggtttcggtggcagacttgaacaaaggtgtgattatccagtccggtaatgacgcctgtattgcgctggccgattacgttgccgggagccaggagtcattcattggtttgatgaatggttatgccaaaaaactgggtctgaccaacactaccttccagacggtgcacggtctggatgcgccggggcagttcagtaccgcgcgcgatatggcattgctgggtaaagcattgatccacgatgtgccggaagagtacgccattcataaagagaaagagttcaccttcaacaaaattcgtcagcctaaccgtaaccgtctgctgtggagcagcaatctgaatgttgatggcatgaagacaggaaccacggcaggcgcgggatataatctggttgcttcggctacccagggcgatatgcgtttaatctccgtagtgctgggggcgaaaactgaccgtatccgttttaatgagtctgagaaattattgacctggggtttccgcttctttgaaaccgtgacgccaattaaacctgatgccacctttgtgactcagcgcgtctggtttggtgatgagagcgaagtgaatcttggggcaggcgaagcgggctcagtgaccataccgcgtgggcagctgaaaaacctgaaggcgagctacacgttaacggaaccgcagcttaccgcaccgctgaaaaaaggtcaggttgtcgggaccattgatttccagcttaacggtaaatccattgagcagcgtccgctgatcgtgatggaaaatgtggaagagggcggattctttggtcggatgtgggatttcgtgatgatgaaattccatcagtggttcggcagctggttctcttaatcttctgataaccggatggcgcgaaacgtcatccggttatacgtcattaatacatcaacttaatacggtgcgtctgcgcgtacttcacatactcatcttccgggcaacaatcactcaccacaatatcaaagcgtttcaggtcacccatgcgcgccggacgcaccttgccaaatttactgtggtcgacaaccagcacatgcttttgcgccatcgacatggcccagtgttttaccggcaactcttcaagattaaaacaggtagcgcctttactgacatgcacgcccgccgcggaataaaaagcgatatccgggcaaaaattattcaacgtttgctgaaaatcgatgggtttgaaaatggcgttgctggcgtgaaattcaccaccgcacagaaatgcgcggcaatggggtttctctttcagcgccagaaaggtatttagcgaataacaaacggcggtaaaagggatttcattatcaatcgcttcaataatccacggcgtggtggtgccacagtcaaaaaagagagtctgatcgggttctaccagtgtcgcagccatttttgccgcccggcgtttttcttccaccaggcgggatttttgatcgcttaacaggtaatggctggcactgcgcggttccagaacaatatagccgccgagcaaaacgacgggcgcactgtggttgttcagatcgcgacgaatcgtcatctccgaaaccccaagcagggcggcggcgtctttaagatgtaacttatcgctgcgttttaattcttgcagcagctgcccgatacgctcttcgcgacgtgtttccataatccctctgaatagttattgaagcgagccgctcaatactacactttttagcagagatcagtcacgcacccagcctttgcggatcggtaatgcaaaacagaagcgataccacgattgcagacgttgatagagtttatgccccatcgcttgccagataatctgagcgctaaggcagccaatcatacctgccagcaatccaccgagcatatccagcggccagtgcacgccaagataaacgcgcgaccaggcaatgacgacggccagcaccattaaaagtgagccggaccacaggcgatgccagcataaaaatgccagtgcaaaggtgaaaatcaccgtaccgtggtcgcttgggaatgagtcatccgccgcatgatgcaggaagttatagccgatattttcgacaaagggtcggtcgtgcggaaaaagatgtcccatcgtccaggacacaaacaggctgaccgccagcgcgatagcgatttttatcaccagttgccgttgtgctgtaagcccccacaaccaaagcaccgcggccagcagcggtaccacggtaatcaaatctttagcaataaaaatcgccaacgagatcatccacggagccgagtctggcgtcgcgttaataagagagaatagagagagattcaaattttccagcataacttcccgacgcaaagtgattaaaagggagccaatacaggcaagtcgttgagaataaagtgcaggttaaactgggtaaagcggcatcgtcttatttccctcaagcggcctgtttacggtgggtaattgtaacgggcataggttaaataaaacttaaagaaagcgtagctatactcgcaataatgtaagaatgtgcttaaccgtggtttcagctacaaaattcgctttctcgttagctgtgcttttattaaactctgcgcgattattattggcgaagaaattgcatgcaaaataaattagcttccggtgccaggcttggacgtcaggcgttacttttccctctctgtctggtgctttacgaattttcaacctatatcggcaacgatatgattcaacccggtatgttggccgtggtggaacaatatcaggcgggcattgattgggttcctacttcaatgaccgcatatctggcgggcgggatgtttttacaatggctcctggggccgctgtcggatcgtattggtcgccgtccggtgatgctggcgggggtggtgtggtttatcatcacctgtctggcaatattactggcgcaaaacattgaacaattcactctgttgcgcttcttgcagggcataagcctctgtttcattggcgctgtgggatacgccgcaattcaggaatccttcgaagaggcggtttgtatcaagatcaccgcgctgatggcgaacgtggcgctgattgctccgctacttggtccgctggtgggcgcggcgtggatccatgtgctgccctgggaagggatgtttgtcttgtttgccgcattggcagcgatctcctttttcggtctgcaacaagccatgcctgaaaccgccacgcgtataggcgagaaactgtcactgaaagaactcggtcgtgactataagctggtgctgaagaacggccgctttgtggcgggggcgctggcgctgggattcgttagcctgccattgctggcgtggatcgcccagtcgccgattatcatcattaccggcgagcagttgagcagctatgaatatggcttgctgcaagtgcctattttcggggcgttaattgcgggtaacttgctgttagcgcgtctgacctcgcgccgcaccgtacgttcgctgattattatgggcggctggccgattattattggtctgttggtcgctgctgcggcaacggttatctcatcgcacgcgtatttatggatgaccgccgggttaagtatttatgctttcggcattggtctggcgaatgcgggactggtgcgattaaccctgtttgccagcgatatgagtaaaggtacggtttctgcggcgatgggaatgctgcaaatgctgatctttaccgttggtattgaaatcagcaaacatgcctggctgaacgggggcaacggacagtttaatctcttcaaccttgtcaacggaattttgtggctgtcgctgatggttatctttttaaaagataaacagatgggaaattctcacgaagggtaaaaaaatgcctgattgctttgtgcgatcaggcattctcgaattaatggtgatggtcgtcaatctggtgttcgataaccatcccttcacctacgctggcaagatggcgaacataaggatgcgggcggtaagccggagctggcgcaggagccacatagacggtttgcggcacagtcgcgacgctgaccgcttgtggaacgctgactgaatcaggaaccacaaccactttgtatccactcggcacatcgacggtgacactttgcgccatcgccacaccagtaaagcccattaaaagcgcgcccaacagtagacaatttttcataatcatttcgcctgaaataatgcagcgggttaatttccgcgaattatgcagccttcattcaggtattgtgttgccgggcgtgctgccgtttttattggtcaaatggcgcttcgtgtttaagcactttatcgatcacatccagtacgccttcacggttattggagcctgcccggtattttgccgctgcgacgaccgcgctgccggcattttccattgcaaaactaaagcctgcctgacgcagcatctcaatatcgttaccgccatcgccaaagaccaccacttcgctgtcgtctattccccataatttctgcagttggcgaaggccattggctttatgtacgccggggataatcagatcgatgctgccgttgccggtgtggactggcaccataatatcgccgatggcctcatgtaatgctttttgtacttgtggaatcagttcatcggaaagattcaggccaaacttaaagaaaatatcttctaagttgtcaaagttatcgacgtattccagacggtgataatacatttccgccaccgttttcatggcatcgtcatattttttgagcgtataggcgctattttttccgcaggcaataatttccacttccgggcgcgtcagcaaatgttccacgacagtagtaaaggcatccttcgacagctcgccattaaaaacatctttgccttcactcactacccagccgccgttttcagccacaaaggcaatttcattcgcaatttcagggaagaaagagatcaactgataatattgattcccgctggcgaccacaaagcgaatgccttgtgctttcatttgctgatactgagccataaaccgctcacggttataggttttttgatcgcttaagaaagtaccatccatgtctaccgcaattaatttaatgctcatcaactattctccatcgccgtctgcgttttggtatcgggtttggcgacggctttcgcgacaatagccgcgagaataaccagcgccagtacaaccagcattgcactacgtaatccataatgttcgccgagatagcccagcagcggcggcccgacgaggaaagccagataaccggtcgttgctaccacactgacgcgggttggtgcatcggggccggtatcgctggcggcagaaatggtcagcgggaagcccagcgaggcacccagtccccagagtacaacagacaccccagcgacccaggcgctatcgataaaaataatcagcccaatacccaacgcccccattagtgcactggcccgaaccacggcaacgcgactgtaacggtcgatgaaccaaccgccggtgaagcgtccaacggtcatccccagggtaaaaccggcataaatcagcgagccggaagtagggctaaaaccgtgaccgtcaaccattaataagggtaaccagtcgttggcagaaccttcggcaaaggccatcgccagcaccacaacacctatcagcagcaactggatatcgcgataaaaaggtacgcctttttcgccatgctgggtgccatcggcagcatttttgcccgtaccgtcagggattgcctgaatggcgatataaataggtgcgatacctaccagcgccgccaataaaatgtgcaccgttgccggaacgccaaaggccgtcagtgccatcccgacacctgcgcctgccagcgtgcccaggctataaaaaccgtgcatcatcggcaaaaccgtcttattcatttctcgctcaacggcagcaccttcaacgtttatcgccacttccgcagaaccaaaacttgccccaaagacgccgagaccaacggcaaagagcaggggcgatgtcagccagagtgccagacttaatatcatcatcccgatcaatgcgcaggacatcgtgaccaggatgacattacgcgtgccaaagcgtttcactaaccacgccgagcagagaataccgctcatcgaaccgatcgacagaccaaagagaacaccgcccatttcagcgatcgagacagagagaatatcgcggatagcaggcgtacgggttgcccaggacgccattaacaggcctggcaaaaagaagaacataaacagcgcccaggttcggcgtttcaatgcattacgtgaagaatttacggtcatagatcacgtcaaaataagaagagggaagacaacattagcaaggttgtgtacatttgtacacaattgcagagagaggaaatgacatgcgtcgcgctaacgatccgcaacggcgagaaaaaattatccaggccacgctggaggcggtgaaactttacggaatacatgctgttacgcaccgcaaaattgctacccttgccggggtaccgttgggatcgatgacctactatttttcaggaattgatgagttgttgctggaggcgttcagcagttttactgagattatgtcccggcaatatcaggcattttttagcgatgttagtgatgctcaaggcgcatgccaggctatcaccgatatgatctacagctcacaggttgcaacgccggataatatggagctgatgtaccagctctacgcgctggctagccaaaaaccgctattaaaaacggtaatgcaaaactggatgcagcgcagtcagcaaacgctcgaacaatggtttgaacccggaaccgcccgcgcgcttgatgcgtttattgaggggatgacgctgcattttgtcaccgaccgtaagccgctatcgcgcgaggagattttgaggatggttgagagggttgcagggtagtagataagttttagataacaaaaaaaccatcaaccttgaaccgaaatggcggggttgatgggctccacaaaatggggacatcaaagaaaagcagtggcactaattaagactgatgccctgcggaaaagttctgcggttgtgcaaaaaatttcattttcagggcaacttcagttttatcctaatcctggccataccatgacgatgattgtccctgccagcgtcagcaggacgttggcgattgcgtaggtgcccgcatagcccagcgcagggatgttactgcgagctgtatcactgatgatctccattgccggcgcgcaggtgcgtgcgcccatcattgcgccgaacaacagtgcgcggttcattcgcaatacataagcaccgaacaagaaacagataaccacgggcacaagactgacaattaatccggcaatcaacatctgaccgccaatcgcgcccaggccgttattaataccgctaccggcgctcagaccaacgcctgccataaacaccatcaagccgaactctttcaccatgcttaatgcaccttgcggaatgtaaccgaaggtcgggtggttagcacgcataaagcccagcataattccggcgaataacaacccggcagcgttccccatgccgaaactgaatgtgctgaactggaaggtgatcatcccgatcatcagcccaataacaaagaaggcgcaaaatgccagcaggtcagtgacctggctgtgaatcgagataaagccgatgcgatcggcgatggtttttacgcgacgggcatcaccgctgacttgtaaaacgtcacctttgttaagcacgacgttgtcatctatcggcatctcaatctggctacgaatgacgcggttaaggaagcaaccgtgatcggtcaacttcagttgtgcgagacgtttacctacagcgttatggtttttaacgaccacttcttcagtgacgatacgcatgtcgagaaggtcacgatcgaaaacttctttaccgttacggaagctgggatcgagtcgggcatgggcgtcgggatagcctaccaacgctatttcatcgcccatttgtagcacggcatcaccgtctggatttgccagaatcccgttacgtcgaatacgttcaatgtagcagccggtttgtcgataaatacccagttcacgcagatttttgccgtcggtccaggccaccagctccgggccgacgcgataggcgcggatcaccggtaaataaaccttacggttggcatcagtgtccaggccacgttcgcgggcgatttgctgggcgctggtctgtaagtcctgatgctgcaatttcggcaagtaacgcgcaccaacaatcaaactcaccagaccgattaaataggttaaggcatacccgaggctcagattatccagtgccagtgagagctgcctgctttccatgccggaatgacgcagtgtatcgccagcaccgaccagaaccggtgtcgacgtcatagagcctgctaacataccggccgtcaggccaatatcccagccaaacagcttacctaaccctaaggcgatcaccagcgcactgccaaccatcaccagtgctaacattaggtaatttttcccatcgcgaaaaaaaatggaaaaaaagttcggtccggcttcgaccccgacgcagaaaataaacagcataaagccaagattaagcgcatcggtgttaatgctgaaatgttgttggcctaataacagcgatacgactaaaacgccaatggaattacccagttggatcgaaccaagtcgtaactttccgagacatagcccaagcgcgaggaccacaaataataacagaatgtaattcccatttaacaattcggcgacgtttatattcacggaggctaacttcttgtttactagtaagctgttgaaagaaatggtaatttacgataatgttttttaccagaattcagggcgcagattcattcagcgcacctaaacgatagtaaagtaacaatatattttactagtgtaatcacattaggtatcaacggctatatgaattgcgttggcctatattagcatggaatgcgaagcggctttatcttactgaacgccacactggcgaaaaatgtgttcgatagacgcagtgtcaggaggaacgagtgaaacataaacaacgttgggcgggggcaatctgctgttttgtcctcttcattgtggtgtgcctttttctggcgacgcacatgaaaggcgcttttcgggctgccgggcatcctgaaatcggcttgctatttttcattcttcctggagcagtcgccagcttcttttcacagcgtagagaagtcctgaaacctctgtttggcgcaatgctggcggcaccctgttcgatgctcattatgcggctgttttttcaccgacgcgctcattctggcaagagctggcatggttactaagcgcggtgttctggtgtgcgctgggggcactgtgtttcttatttatcagtagtttgtttaaaccacagcacagaaaaaatcagtaaagccctcaacgcgagggcttgtcagacgatcaggcgtccagattttctttcacccatgcagcaaaatcggtatagccgccgatatgttgctgatcgacaaaaatctgcggcacggtttctacgggtttacctgccttttgttgtagatcttctttagtgatcccttccgcacgaatatctacatactgatactgaaaatcatcgcgttcattgctcaatttctcagccagatcttttgcacgcacacagtaagggcaacccgaacgaccaaaaataacggtttgcattatttctctcctcatagatttatgcctgtaatgatcacgctaaaatgtattcgctgaaagtaggtttaacctgttgcattaattgctaaaagctataactgttaaacacaatacagtgaaaagttttagactgaaggctcactttgcagagggaagcgtatgcgcgcgatcggtaaattgcctaaaggcgtgttgatactggaatttatcggaatgatgctactggcggtggcgctgctgtcggtaagcgactccctgtcgctgcctgagccattttctcggccagaagtgcagattctgatgatttttctcggtgttttgctcatgcttcccgctgcggtggtggttattcttcaggtggcaaaacgtcttgccccacagctgatgaaccgtccaccgcaatattcacgttcagaaagagaaaaagataatgacgccaaccattgaacttatttgtggccatcgctccattcgccatttcactgatgaacccatttccgacgcgcagtgtgaggcgattattaacagcgcccgtgcgacgtccagttccagttttttgcagtgcagtagcattattcgcattaccgacaaagcgttacgtgaagaactggtgacgctgaccggcgggcaaaaacacgtagcgcaagcggcggagttctgggtgttctgtgccgactttaaccgccatttacagatctgtccggatgctcagctcggcctggcggaacaactgttgctcggtgtcgttgatacggcaatgatggcgcagaatgcattaatcgcagcggaatcgctgggattgggcggggtatatatcggcggcctgcgcaataatattgaagcggtgacgaaactgcttaaattaccgcagcatgttctgccgctgtttgggctgtgccttggctggcctgcggataatccggatcttaagccgcgtttaccggcctccattttggtgcatgaaaacagctatcaaccgctggataaaggcgcactggcgcagtatgacgagcaactggcggaatattacctcacccgtggcagcaataatcgccgggatacctggagcgatcatatccgccgaacaatcattaaagaaagccgcccatttattctggattatttgcacaaacagggttgggcgacgcgctaaaaccgccacgtcgatgtatgatacgcgggcttttgaccaggtctgacagagaggtgcagggtgaaaattgccatattgtcccgggatggaacgctctattcgtgtaagcggctgcgtgaagccgctatacagcgcggtcacctggttgaaattcttgatccgctttcttgctacatgaacataaatcctgcggcgtcttctattcactacaaaggccgcaagttaccccattttgacgcagtgatcccgcgtattggcaccgccattaccttttatgggacggcggcactgcgccagttcgagatgctggggagctatccgctcaatgagtcggtcgccattgcccgggcgcgtgacaaattgcgttccatgcaactgctggcgcgtcagggcatcgacctgcctgtcacgggcattgcgcattcgccggatgataccagcgatttaatcgacatggtcggtggtgcgccgctggtggtcaagttggttgaaggcacgcagggaattggcgtcgtgctggcggagacgcgtcaggcggcggaaagcgtgattgacgctttccgcggtctgaacgcgcatattctggtgcaggaatatatcaaagaggcgcaagggtgcgatatccgctgtctggttgttggcgatgaagtggtcgctgcgattgaacggcgggcgaaagagggcgattttcgttccaatttgcatcgtggcggcgcggcaagcgtcgccagtatcacaccacaggagcgtgaaatcgcgataaaagccgcgcgaacgatggcgctggacgttgctggtgtggatattctgcgtgctaatcgcgggccgttggtgatggaggtgaatgcgtcgccggggctggaaggaatagaaaaaaccaccggtatcgacatcgcgggtaaaatgatccgctggatcgaacgccacgctacgacagaatattgcctgaaaacgggtggttagtcgcaatcacattactgatcatggttttgcctgcgctttttgcgtaagctgtgccggtctttttatcgaaagaggttgtacaaaattatgacatcgctggtcgttcctggtctggatacgctgcgtcaatggctcgatgacctggggatgagtttttttgaatgtgataactgtcaggctctgcatctgccccatatgcagaatttcgacggtgtctttgatgccaaaatcgatctgatcgataacacgatcctgttttctgccatggcggaagtccgaccttcagccgtattgccgctggcggcggatttatctgccatcaatgccagttcgctgaccgtgaaagcatttcttgatatgcaggatgataatctgccaaagctggtggtttgccagtctttatccgttatgcagggcgtaacctatgagcagtttgcatggttcgtgcgtcagagcgaagagcagatttcgatggtcattcttgaagctaatgcccatcaactgctgttaccgactgacgatgaagggcaaaacaacgttaccgaaaactattttctccactgataattcctttcgagcacgcagtcgctgccgcagtgactgcgcgctgcaaaattatctgctgtttttaaccttttcttaaagattatttcacttatcttgtgtcgatttggctttatcacatagagcaaatacgcataaaaatttgttaaataccgttttttaatccgagctatagtctcaaaccctggctaaagttattcttgcgatgcttttatatagcgagcagtgctggccgggagagagttctcttttcttacaccgcgccgataaaaaatatgcacttttattgcatatctttcagtgtgacaacttttgttcgtttgttaacgaactttcagaaggaaagagatatgaccgccttaaataaaaaatggctatcgggtctggttgcgggtgctctgatggccgtctctgtcggcacgctcgcggctgaacaaaaaacactccacatttataactggtctgattatatcgcccctgacacggtggccaattttgaaaaagaaaccggtattaaagtcgtctacgatgttttcgactctaacgaagtactggaaggcaaattaatggcgggtagcaccggctttgacttggtggttccatctgccagctttcttgaacgccagctgacagcgggagttttccagccgctggacaaaagcaaattgccggagtggaagaatctcgatccggagctgctgaagttggtcgccaaacacgatcccgacaataaatttgctatgccctatatgtgggcgacgaccgggattggctataacgttgataaagttaaagctgtgctgggcgaaaacgcgcccgtcgatagctgggacttgatcctcaagcctgaaaatctggaaaaactgaaaagctgcggtgtctctttcctggatgcgccagaagaagtttttgctaccgtgctgaattatctcggcaaagatcccaacagcactaaagcggatgattacaccggaccggctaccgatctgctgttaaagctgcgcccgaacattcgttatttccattcatctcaatacattaacgacctggcaaacggcgatatctgcgtcgctattggctgggcgggcgatgtctggcaggcgtcaaaccgcgcgaaggaagcgaagaatggcgttaatgtctcgttctcgattccaaaagaaggggcgatggcgttctttgatgtattcgccatgcctgcggatgccaaaaacaaagacgaagcctatcagttcctgaattacctgctgcgcccggatgtagtagcgcatatttccgaccatgtgttctatgccaacgccaataaagcagccacgccgctggtgagtgcggaagtccgtgagaacccgggtatttatccgcctgcggatgttcgtgcgaagctgttcactctgaaagtgcaggacccgaaaatcgaccgtgtgcgcacccgcgcgtggaccaaagtgaagagcggaaaataatccgcagccttagatgccgggcgggcgcaccacacccgccggcaattcgcaccatcatggtgcgcttgcacacattcaatgccggagagcagccgtgaatgacgctatccctcgcccgcaggcgaaaacccgtaaggcgctgacgccgctattagaaatccgcaacctcaccaaatcctacgatggtcaacatgcggtggatgatgtcagcctgaccatctacaaaggtgaaatcttcgcgctgctgggcgcatccggctgtggcaagtccacgctgctgcgtatgctggcaggtttcgaacaaccttctgccggacagataatgcttgatggcgtcgatttgtcacaggtgccgccttacctgcgccccatcaatatgatgtttcagtcttacgcgctgtttccgcatatgaccgtggaacagaacatcgcttttggcctgaaacaggacaaactaccgaaagcggaaattgccagtcgggtccatgagatgctcggcctggtgcacatgcaggagttcgccaaacgcaaaccgcatcagctttccggtggtcagcgacagcgtgtggccctggcccgaagccttgccaaacgcccgaaactattactgctcgatgagccgatgggcgcgctggataaaaagctgcgtgaccggatgcagcttgaagtggtggatattctggagcgcgtcggtgtgacttgtgtgatggtcacccacgatcaggaagaggcgatgaccatggcggggcgtatcgccattatgaatcgcgggaaatttgtccagattggcgagccggaagagatctacgagcatccaactacccgctacagcgctgaatttatcggttcggttaatgtctttgaaggtgtactcaaagagcgtcaggaagatggcctggtgcttgattcgccggggctggtgcatccactgaaagtcgatgcggatgcttcagtggtcgataacgtgccggtacacgtagcgctgcgcccggaaaaaatcatgctttgcgaagagccgcccgccaatggttgtaacttcgcggtgggggaggtgatacacattgcctatctcggcgatctttcggtgtatcacgttcgtctgaaaagtgggcagatgattagcgcccagctacaaaacgcccatcgtcatcgtaaagggttaccgacctggggcgacgaagtgcgtttgtgctgggaagtggacagctgtgtggtgctgacggtttaaggagcaaagatgaatacacttgaacctgctgcccagtcgaaaccgccgggcggatttaagctgtggttgtcgcagctgcaaatgaagcatgggcgcaaactggtcattgcgttgccatatatctggttgatcttgctgtttctgctgccatttctgattgtctttaaaataagcctggcggagatggcgcgcgctattccaccttataccgaactgatggagtgggctgacgggcaactgtccatcactcttaatctcggtaattttctgcaactgaccgacgatccgctctatttcgatgcttatctccagtcgctacaggtggctgcgatttcgacattttgctgtttactgatcggctatccgctggcgtgggcggtggcgcacagtaagccttcgacccgtaatattttattactactggtgatcctgccgtcgtggacctcgtttctgatccgcgtttatgcctggatgggaatattaaaaaacaacggtgtgctgaataattttctgctgtggctgggggttatcgatcaaccgctgaccattcttcataccaatctggcagtttatattggcattgtttacgcctacgtgccgtttatggtactgccgatttataccgcgttgattcgtattgattattcgctggtggaagcagcgctggatctcggtgcacgaccgctgaaaacgttctttactgtgatcgtgccgctgactaaaggtgggattattgccggatcgatgctggtgtttatcccggctgtgggcgagtttgtgatcccggaactgctcggtggcccggacagcatcatgatcgggcgcgtgctatggcaagagtttttcaataaccgcgactggccggtggcctcggcggtagcgatcatcatgttgctgctgctaattgtgccgataatgtggttccacaaacaccagcaaaaaagcgtgggagaacacggatgaataatttaccggtagttcgttcaccctggcggattgtgattttgctgctgggctttacctttctctacgcgccaatgctgatgctggttatctattcgtttaacagctcgaagctggtgacggtgtgggccggctggtcaacgcgctggtatggtgagttattgcgcgatgacgcgatgatgagtgcggttggtttaagcctgacaattgctgcctgtgcggcaacggcggcggcgatcctcgggactattgcggcggtggtgctggtgcgctttggcagatttcgcggatcaaatggctttgcctttatgatcaccgcgccgctggtgatgccagatgtcatcacgggcttgtcgctgttgttattattcgtcgcgcttgctcatgccattggctggcctgcggaccgcggtatgctcaccatctggctggcgcatgtcactttttgtacggcttatgtggcggtcgttatttcttcaagattgcgggaactggatcgctcgatagaagaagcagcgatggatctcggtgcgacgccgctgaaagtgtttttcgtcattacgctaccgatgatcatgcccgcgatcatttctggctggttactggcttttactttgtcgcttgatgatctggtgatcgccagctttgtttccgggccgggagccaccacgttaccgatgctggtcttttccagcgtgcggatgggggtgaatccggaaatcaacgcccttgcaacgttaattctcggtgcggtcggaattgtcggatttatcgcctggtatctgatggctcgcgcagaaaaacagcggatacgcgatatccagcgtgcaagacatggctgaagacactaaaatttgccaacctggctacataatgccgcgcatgccgcggcattgttttcatggaagacgaaacgttgggattttttaagaaaacatcttcatctcatgctcgcctgaatgtgcctgcgctggtgcaggtggcggcgctcgccattattatgatccgtggcctcgacgtgctgatgattttcaatacgctgggcgtgcgcggtattggcgagttcattcatcgcagcgtacaaacctggagtttaacgctggtctttttaagcagtctggtgctggttttcattgagatctggtgtgcgttttcactggtgaaagggcgtcgctgggcgcgctggctatatctgctgacacaaatcaccgccgcaagttacttgtgggcggcttcgctggggtacggttatccggagctgttcagcattcccggtgaatcaaaacgtgaaatcttccatagcctgatgctgcagaagctgccggatatgctcatcctgatgctgctgttcgttccctcgaccagtcggcggttcttccagttgcaataatgtgtataatcgtcgcccctgatgatgtgaaggtcaatgtatgcagtgcgcactttacgacgcgggtcgctgtcgttcctgtcagtggataacgcagccgattccagagcaactctccgctaaaaccgccgatcttaaaaatctgctcgccgattttccggttgaggaatggtgcgcgccggtgtcaggcccggaacaagggtttcgtaataaagccaaaatggtggtgagtggtagcgttgaaaaaccactgctcggtatgctgcatcgcgacggcacaccagaagacctttgtgactgcccgctttatcctgcctcatttgcgcccgtttttgcggcgctaaaaccgtttatcgcccgtgcggggctgacaccctacaacgtggcgcgtaagcgtggcgaactgaaatacattctgctgactgaaagccagagcgatggcggcatgatgctgcgctttgtactgcgttctgaaaccaaactggcacaactgcgtaaggcgctgccgtggttacaggaacaactaccgcaactgaaagttattaccgtcaatattcagccggtacatatggcgattatggaaggggagacggagatctaccttactgaacaacaggcgctggcagagcgttttaatgacgtaccgctgtggatccgtccgcaaagtttcttccagactaatccggcggtcgccagccagctgtacgctaccgcgcgcgactgggtacggcagctgccagttaaacatatgtgggatctgttctgcggtgtgggtggctttggtttacactgcgcgacgcctgacatgcagttaaccgggatcgaaattgcatcagaggccattgcctgtgcaaagcagtcagccgctgaactgggcttaacgcgtttgcaatttcaggcgctggactccactcagtttgccaccgctcagggggaggtgccggagctggtgctggttaatccgccgcgccgcggcattggtaaaccgctatgtgattatctctcaacaatggcaccgcgttttattatctactccagctgtaacgcccaaaccatggcgaaagatatccgcgaactgccaggttaccgcatcgaacgggtacagctttttgatatgttcccgcacaccgcgcactatgaagtgctgacgctgctggtgaagcaataaaaaagccgcaggtgcggcttcagattgctgatcaggtgcgctttgttcatgccggatgcggcgtgtacgccttatccggcctacaaaatcatgctaaatcaatacattgcagagttgatgtgggccggataagcgcagcgcatcaggcaatcttacttttgtcatcagtctcaattactgcggaaaccactggtcattgattttctgatatgtaccgtcagctttaattgctgccagcgcgttattcagtttttccagcagagctttgttatccggacgtacagcgatgcccagaccggtgccgaagtattgcggatcggtcactttttcagtagcaacgcccagttgcggattggttttcagccattcgtttaccaccgctgtgtcaccaaataccccatcaatacgaccatttttcagatcgataaaggcattctgataactgtcataggagacagttttcacttcggggtgctgatcctgaatatatttctggtgcgtggtgccgttttccatcccaatacgtttgcctttcagatcggcaaacgttttgtaggtatcttttttggcaatcacgacggctgagttttcatagtagggcgtggtaaacgatacctgcttgctacgctcgggcgtgatatccataccggagattacggcgtcatattttctgaatttcagtgacgggatcaggctgtcgaacgcgtgattagtaaaagtacattctgcctgcatttgtttgcacaaggcttttgccagatcgatatcaaagccgacaatctcattattagcacctatagattcaaagggtggataggtggctgaaacgccaaaattgattttctctgcggcagaagcaccgaaagtaaaggaagcaagtaaagcggcaagaactaactttttcatgatggaactcccgtctgtcaatcttatgatttttggccgtgtctgcggcatgggataacaatgccatcaagtgaatttatatgcaataaatatgattaaataatttaaatgaaataaaaaaagacggataccttagtgagttgtccgtcttcattataagaatttatgcactatgtaggccggataaggcgtccacgccgcatccggcacaggcaccgtgctgatgtctgatgcgacgctggcgcgtcttatcagacctacaaacccccccggcgaatgtacgcagctacattaatttcgccgttcgaatgccagtgctttgcgctcgatcagacgcatcatcagcgtcagcaggccgttgacgaccaggtaaataatccctgccgcaccgaacaccattacatcgtaggtgcgtccgtacaacaactggctgtatcccatcacttccatcagcgtaatggtgtaagccagagaggtacttttgaacaccagcaccacttcgttggaataagaagagagcgagcgtttaaaggcatacggcagcaggatcgccagcgtatcttttttgctcattcccagggcgctacaggactgccactgaccttctgggatcgcacgaattgcaccgtaaaacagctgcgtggtatacgccgcactgttcagcgataacgcaatcagcgcacataaccacggttctgacaacaaatgccacagtgccggatactcctgcaaagtcggaaactggcccggcccgtaataaatcaggaagatctgcaccagcagcggcgtaccggtaaacagcgtgatataaccccgcaccagccacaccagcaccggcgttttcagcgtcaggatgatggtaaaaatcaatgccagaatcagtgccacaatcagcgaggcaacggttagcgtcaggctggtgtgtagccctttcatcagttcgggtaaatactcaaacattagctgggcctccgctcaaaacgtgtcgcgcgcaggtcaatgcgtttgagaatgtactgactgagcagggtgatcaccaggtaaatcgccgccgccacaatgtaccaggtaaatggttcctgggtacgagtagcgatgctttttgtttgcagcattaaatcattcacactaatcaaactgaccagcgcggtatctttcagcagcaccagccactggttaccgaggccaggcagcgcatgacgccacatctgcggcatcaccagacggaaaaagatagccgatttcgacagccccagcgcctgaccagactcccactgacccaccggcaccgctttcaacgcgccccgaagcgtttgcgaggcataggcggcatacagcagtgacagagcgatgacaccacaaaggaacgggctaacgtcgaagttctcaatgtccatctgcactgggatctgcacgaacccaagattgatagtgaagccatccgaaagcgtcagcagcagctgcgaggagccaaaatagataaacagcaccaccagaatttctggcaggccacgcagaatggttaccagcgctgaacctgcccacgcgacaggacgccattttgccgactcccataccgcaaagaacatcgccagcgccagcccgacaatcaatgcacaaacggcaaggccgacggtcatcccggcggcgcttgctaaaggaaaaaattcattcatcaggaattacttctggaaccatttgttgtagatggtttcgtaagtgccatctttcttcactttttccagcgcagtgttgagtttctgctgcagctcagtgttgccctgacgtaccgcgatgccgaggccagtgccgaagtaatctttatcggtcactttgtcgcccaccgccgccagtttcgggttatctttcagccactcagtgaccactgcggtgtcaccgaagacgccgtcgatacgcccgttttgcagatccagttttgcgttctggtagctgtcatacggaacggtagtgatttccgggtgcttatccataatgaatttctggtgtgtcgtcccgttctgaacgccgacttttttgcctttcagctgatcaacactggtgtatttgccttgctgacccacaaacagggcagagttgtcatagtacggggtggtaaacagtacctgcttttcacgctccggagtgatatccatgcccgccatcactgcttctacgcgacggaatttcaggcttgggatcaggctgtcaaacgcctggttagagaaagtacaggttgcatcaatctctttacacagtgcctgtgccaggtcgacgtcaaaaccaacgatctggttgtttgcatcaatcgattcaaacggaggataggaggcttcggtagcaaaacgaatggtttcggcagctgtggcggaaagactaaaacctgcaattaacgcggcaatcagaacttttttcattgttgttatcccgaatcttagtgagagagatagtttttaaatgcttcggtttgcggctcggtaaagcagctcgcgtcgccttgttctacgatatgaccattttccatatacaccactcggctggcggttttacgcgccacttcaacttcgtgggtgacgatcacctgggtaatattcgtttctgccagctcacgaatgatgctgacgatttgtgccgtaatttccgggtccagtgcggcggtcggttcatcgaacagcagtacctgcggttccatcatcaacgcacgggcaatagcaacacgctgctgctgaccaccagaaagatgcagcgggtaacgatcgctataaggtttgagacgcagacgttccagcagtttttctgcacgggccagcgcctgatctttactcaaccccagtacacggcagggcgcttcaatcaggttttgctgcacggtcagatgcggccacaggttgtattgctgaaacaccatgccaacgttacgacgcaaatcgcgaatcgctttgtcagagggtgttttggtgaaatcgaaatggttgcctgcaatgttgagcgtaccggagcgcggcatctcaagcagattgagtacacgcagcagcgagcttttacccgcgccgctggggccaagtaacaccagcgtttcgccctgtgggcaatccagcgtgatatcgaacagcgcctgatgcgcgccgtagaagcaattaatgccgtttaattgaatactcattgacactcgtatactggcagtctgatagctattgaggtcgaagatagtacctttgacagaataattatgcaatatttctgctttaaaagttaaaagcaaagcgcattattcaataaacatagcacaaaataacgggggcggtggtcggcgagcataaatgtcggcattcctcacgaaatgccggacaatttacggggtttattggttgatcaaggcgttagcgattctcgatggactgacggagcgtacccgccgtggcatgaacgctaccgcctaagtaacgcacatcgtcgatgacccaacactggccttcctgaatcattaacacttcatcctgccaaccctggtcaccctgtttgagatccacgcgcaatggaatgttacgggcatcacgattagggatagtcgatgcactggcaacgtgggcgctatctggcaaggtggttcgactggagaatggatcgttggtcagtagttcccgatggttattatcccgggaggcatcgctaagcagtgtcgccagtttgtcgctcagataagggcgcaaggcggtgatgtcgttgctgcggtgcaaaatgcggtagtcataaaattgctgggccacgttatccgggcctccttcaacgcaaggaccactgcgtgtgccgttatctttataagctggagtgactgtggtgcaggcactgaggagcagtgcgcaggggataagcattgtcaatttgctgtagcgcataatgatttccttataagcgatcgctctgaaagcgttctacgataataatgatatcctttcaataatagcgtatcagtctgataatgcttttgagatcgaaggcttagcaaacaaggagatcgatcatgcaattttctacaaccccaactctggaaggccagaccatcgttgaatattgcggtgtggtgaccggcgaagcgattttaggtgccaatattttccgtgatttctttgccggtatccgcgatatcgttggcggacgttccggtgcgtatgaaaaagaactgcgtaaagcacgggagatcgcctttgaggaattaggctcccaggcgcgggcgctgggggccgatgccgtcgtcggtattgatatcgactacgaaacggtcgggcaaaacggcagtatgctgatggttagcgtcagcggtacggcggtgaaaacgcgtcgatgagaagagtcttctggctggtcgctgccgctctgttattggcagggtgtgcaggcgaaaaaggcattgtcgagaaagagggatatcagcttgatacccgacgccaggcgcaggcggcgtatccgcgcattaaagtgctggtgatccactacaccgcagatgattttgatagctcgctggcgacactgaccgataagcaggtcagctcgcattatctggtccctgcggtaccaccgcgatacaacggtaaaccgcgcatctggcaactggtgccggaacaagaactggcctggcatgcggggattagcgcctggcgcggggcaacgcgccttaacgacacctctattggcattgagctggaaaaccgtggctggcaaaaatcggccggagtgaaatattttgccccgtttgaaccggcacagattcaggcgcttattccactggcgaaagatattattgcccgttatcacatcaagccggaaaacgtagtggcacatgcggatatcgcaccgcagcgcaaagacgatccggggccattatttccctggcagcaactggcgcagcaggggattggtgcctggccggatgcgcagcgggttaacttttaccttgccgggcgcgcgccgcacacaccggtagataccgcgtcattgctggagcttttggcgcgctacggttatgacgttaaacctgatatgacaccgcgcgagcagcggcgcgtgattatggcattccagatgcatttccgcccgacgttatataacggcgaagcggatgcagaaactcaggcgattgccgaagcattgctggagaaatacgggcaggattagcgcggcagttttccgtggtcgcgtagccaggcggcagttttctcgataccttcatccagggtgatgaccggctgataacctaactcttcctgcgcacgcgtaatatccagcgtaaagtcaaaattcaacttggagacgccgtagtgggtcagcggcggctcttttgctgacttgcggcctaaacgctccatgctgcgggcgatcatatccagcatcgggtaggggacggaacgaatacgacagtcaatattcaactcgtcgatcagcttctgcacgatgctgcgcagtgtgcgatgctcgccgttggtgatgttgtacacacgcccggaaggtagcttatcgcaggcttcctggcttgccagccacattgcgtgcacggcattttcatagtaggtcatatcgaccagcgcactgccgccatgcggtaacagaatactgccgtagtggtgcatcatatgcgccagacggggaataaagactttatcgtgcggtccgaacagactttgtgggcgcagaatagtaaagcgcgtttgtggattcgcctgcgaaagcatattgatcacttcttcgctggctgctttgctgcgggcaaactcgttggcgaagcggtgagggcgaaaatcttctttaatatcgcgatggtggtgataatcgaagtacagggagggggaagagatatgaataaagttacgcacaccccaggcgacagcccattcacccaggcggcgagtggcgcgaacgttagccagatcgaaagcctgttgtgtcccccagggtgaggtaaagctggagcagtgccacagcgtatcaatgcccgcgagcatcactttagcttgtgatgaaaccagctcggtcagatccgccggaacaaactctgcgcccattttttccagcaatttgcccattgcctcgttgcgaccggtcgctcgcacgctgatgcctttctggcataaaaactctaccgcgtttcgacctaagccgctggtggcgccggtaaccagtaccttcatatcaatccactgttgttgagaaaataacgtgcgcattcttccgtgatttcccccatgatgcaatgggaaacatgaaagaataacgcaggttttgtcgattaatctgtgctttgttctgccagtctggcgatttgttttgccattccgcgaaaaataaacagatgcgcggggatcatcaataaccagtaaaacagccccggcataccgtgcggatgccagaaagcgcggacatcgatagtacgatagtcgcctttatcttccaggctaaaacacagtcgtcccagccccggcgctttcatgccaaataacaacgtaagttgtttttccggttcaacgacaatcactttccagctatctaccgcatcgccagtctgtaaatattcgcgctccgggcggcctttcgccagcttatgaccgatcgcgcggtccatcaacgcccgtgtctgccacaaaatattgccaaagaaataacgctctttaccgccgatttggttcactacctgccataaagcagcaaggctggcggacgttttaacggtaaaccccgcctgtttggcaaaataaccgtactccggtcgccagcgggcaaaggcctgagcgtcgtagccccagtcgctggagttgaccagtttttcctcctctttcaacgtgctacgtaccgcgtcatcgaaagcgatcagccgttgtgggatgagtgcacgtagcgcggtatcatccgccagcagatcgtgtttcagcccctgaatcaacgccctggcggtggtgggcggtacggaagtaatcacattgagaaaccacaccgaaatccagcgggtggggagggggatggggatcaaccagcggcgcttaccgctcaccgccataaaatgttcaaactgttgctgataactgagcacctctggtccggcggcttcgaagatgcggtgttcgctggccggatgatctaacaacgccaccagatagtgcagcaagttttccagcgcgatgggcgtggtgcgtgaacgtacccagcgtggcggcgttaacactggcaggttgtagaccatatcgcgcatgacttcgaacgccgctgaacctgcgccaacgataattccggcccgaagttcggtcacaggtacattcgcttcacgaagaatgtccgccgtagcctgacgagcacgcagatgatccgactgctcatgtggcggggcctgcaacgaactgagaaagattaattgcttaactggtacttcacgtagcgcatcgcggacgttgagagccacctggcgctcctgagcgataaaatcgccgccttcgcccatgctgtgcaccagaaaatagacggtatcgatatcctgcaacagggccggaaggttatccggccagctgagatcgactttatggcaactgacgtttgccagttgcagctttgcaagcctgtcgacatgacgtgccgccgccaggatctgatgcccttgctggctgagtgtgcgcaccagatgctgaccaatgtagccactggcaccgagaactaaaatgcgttgcggcacgtctctctccttaacgcgccaggaatgcgcgccagtgggcggcgacttccgccagttgttcgcgcgagacgtcaagatgcgtcaccaggcggacaatcggcgaggcgttaatcagcacgtttctcgctttcatgtattcgcctaacgcggcagcattttcttccccgacgcgaacaaacagcatattagtgtcctgacgcatcacatccgcgcctgcttcacgcagttgctccgccatccaggcggcgttgtcgtgatcttcctgcaaccgtgcgacgttatttttcagggcatacatcccggcggcagccagaatcccggactgacgcatcccgccaccggccattttccgccagcggatggcacgtttaatgtaatcacgattaccgacgagtaatgaaccgactggcgtcccaagacctttcgacaggcaaatggtgaacgaatcacaatattgcgtgatctctttcagttcgcagccgtaagccaccacggcattaaagatgcgcgcaccgtcaacatgcagcgccagattgcgctcgcgggtaaattcccatgcttctttcaggtattcacgcggcagcactttgccgttgtgggtgttttccagactgagtaatttggtgcgggcgaaatggatatcgtcgggtttgattttcatcgccactttatccagcgatagcgtgccgtcggcagccgcgtcgatgggttgcggctgaatactgcccagcaccgctgcgccaccggcttcaaacagatagttatgcgcggcctgaccgacaatatactcttcgccacgttcgcagtgactgagcagagcgaccaggttggcctgagtgccggtaggcagaaaaatggcggcttctttaccggaaagctctgctgcatagtcctgcagagcattaacggtagggtcgtctccgtaaacgtcgtccccaaccggggcggccatcatcgcttcgagcatggcgcggctcggtcgggtaacggtatcactgcgtaaatcaatcatggcatgtccttattatgacgggaaatgccaccctttttaccttagccagttcgttttcgccagttcgatcacttcatcgccgcgtccgctgatgattgcgcgcaacatatacaagctaaatcctttggcctgttcgagtttgatctgcggtggaatggctaactcttctttggcgaccaccacatccaccaacaccggaccgtcgatagagaaggcgcgttgcagggcttcatcaacttcagacgctttttctacacggatacccgtaatgccgcacgcttcggcaatgcgggcaaagtttgtgtcgtgtagttcggtgccgtcagtcaaatagccaccagctttcatctccatcgccacaaagcccagcacgctgttgttaaagacgacaattttcactggcagtttcatctgcactactgagaggaaatcgcccatcaacatgctaaaaccgccatcgccgcacatggcgaccacctgacgttctggctctgtcgcctgcgcacccagcgcctgcggcatggcgttagccatcgaaccgtggttaaacgaacctaacaggcgacgcttgccgttcattttcagataacgtgccgcccataccgttggcgtgccgacgtcacaggtaaagatggcgtcatcggcggcaaaatgactaatttgttgcgccagatattgcgggtgaatggctttctcgctcggtttagctaaatcgtccagccctttgcgggcgtcgcggtaatcttccagcgctttatccagaaacttgcgatcggtttttcttccaccagtggcagcaatgcccgcagggttgatttgatatcgccgaccagcgccatatccaccttgctgtgagcgccgatgctggctgggttgatatcaatctgaatgattttagcatcggtcgggtagaaggcgcggtagggaaattgcgtgccgagcagcactaacgtatcggcattcatcatggtatggaaacctgacgagaagccgattaatcccgtcattccgacatcatacggattatcgtattcggcatgctctttaccgcgcagggcatgaacaataggcgctttaattttcccggcaaactcaactaactctttatgcgctcccgcgcagccgctgccacacatcagggcgatattgctggaataacgcagcagttgcgccagtttgcgtaactcttcttcttccggcgtcacgactggctgtggcgcatgataccagtgggtagttgccccttctggcgcaggttttaacgccacgtcgcctggtaacacgacaaccgaaacgccacggttaagcaccgctttgcgcatggcaatcgccagtacttgtgggatctgctccgggctggaaaccagctcgcaatagtggctacattcgcggaataactcttgcgggtgggtttcctggaaatagccgctgccaatttcgctggagggaatatgagcggcaatagccagtaccggaacgtgattgcggtggcaatcgaagaggccgttgattaagtgcaggttgccggggccgcacgatccggcacagaccgccagttctcctgaaagttgtgcttcagcgccagcggcaaacgccgccacttcttcatggcgggtggacatccactcgatggtgcccatgcgattaagactgtcactaagaccgttcagagagtcgcctgtgactccccagatgcgtttcacgcctgccgattcgagtgttttggcgatataagctgcaaccgtttgtttcatggttctccatctcctgaatgtgataacggtaacaagtttagttcatctgacggagggggaagggatgggagagaaaggaggcactaacggttaaatagcccgatgacaggaatatcatcgggcataaggcgattatgcgagaaccaaatccccctgcggatggcaggagcaggccagtacgtaaccttcagcgatttcggcgtcggtcagcgtcattgtgctgctcaccgtatattcaccggaaaccactttcgtcttacagcagccgcaaacacccgcacggcaggcagcgacaaccggaacgttattgctttccaacgcctccagtagcgtggtgccaaccggggcgtaaaattctcgtgccggttgcagtttggtgaatttcagaccgctggtcgccgcttccgctactggggtgaagaatttctctttaaagaaacgcgtcacgccgagcgctttcacttcctgctctacccaatccatatacggagccgggccgcaggtcatcacggtacgtgaagctaagtcaggaacgcgagtcagcagttcgcgagtgagacgaccagcgataaagccttcggtaacgttattttccgccaccagcgttaccggatagttacgccactcatcggcgaaaataacatcctgcggcgtacgcacgttgtagatcacctgtacatcggcctgtggacgattcttcgccagccagcgacgcatcgacataatcggcgtgacgccgcagcctgccgccagcagcaggaatttatcttctgctttatcgtcgcaggtaaattcccccatcgcgtccgaaagccagagataatcaccgcgttttacatcgcgcgtcagccactgggagccgacaccgtcatcaatccgccgcacggtcagggtgatgtattcactcacgcctggcgtggaggaaatggtgtaagcacgcagcgtttccgctgagtttcgtacgctgaccagcgcatattgcccggcgcgatatgggtagtaatcgtggcaaatcagggaaatcgtccacacatccggcgtttcttgcgtaatgtgatgaacctgcatccgccacgggcattgattcgttggcatcgtcatcgacaaactccttacgcgctcaacagttgcttcatgtcttcttcaacagtggtgatagaacgcaggccgaatttctcgttcagcaccgccagcaggtctggtgtcaggaaaccaggtgcagtcgggccggtgacgatatttttcacgcccagagaaagcagcgtcagcagaatgacgatcgctttctgttcaaaccaggagagcaccagcgacagcggcagatcgttgacaccgcagcccagtttctctgccagagtgacagccagaataatcgctgagtaagcatcgttacattgacctgcatctaccagacgcggcagaccttcgatatcgccaaactcaagtttgttaaagcgatatttaccacaggcgagggtcaggatcaggcagtcatccggcacgctggtggcgaaatcggtgaagtagtggcgctcgccgcgtgcgccgtcacagccaccaagcaggaagatatgacgcagtttttcacggctcaccagatcaatcagcgtatccgctgcgccaagcagcgtctggcggccaaagcccacggtgatcaggtgcggaatttcgctgtacgggaagcccgccatttgttgcgcctgggcgatgaccgcagaaaaatcttcgccatccagatgacgcacacccggccagccaacgatgctgcgggtccagatacgatcgtcataagcgcctacggttgggtcgatgatgcagttcgaggtcatcacgatggggccagggaaacgagcgaactccacttgctgattctgccagccgctgccgtagttaccgaccagatgcttgaatttacgcagctccgggtagccatgcgcaggcagcatttcgccgtgggtgtaaacattaacgcccgtgccttcggtctgttccagcaggttgtagagatctttgagatcgtgaccggaaatcaggatgcatttacccgccgtcgctttgacgttgacctgggttggcgtcgggtgtccgtatttaccggtttcgcctgcatccagaatgctcatcactttgaagttcatctggccgatttccattgaacactcaagaagcgcgttcatatcggcaggccaggtccccagccacgccatgattttatgatactgggcataaatatcgttgtcgtattgaccgagaacatgcgcgtgttccatataggccgccgcacctttcaggccatacaggcacagcagacgcaggccgagaatgttttcgccaatcgccgctttatctttgttaggggtaaattctgctgcctgacgttgcagctcgccgagatcgtcgctcaccagttgcaggtcagccatcgggttatcgacgcgcgcgttggcatctacagccaggcattgcgctttcagcgcctcgcgcagggcaatcgcttcacgagcgtagccgacaatacgcggagaatcgaagttaacgttggtcagggttgagaaaaaggcacgtggcgcgaagctgtcaacatcgtggttgatgatgccgtattcacgcgcttttaccgcccaggcagaaagcccttgcagcgccgcgatgagtaaatcctgaaggtcagaagtttccgccgttttaccacacatcccctgcgcgtatgagcagccgtttcctgccggagtacggatagtttgttcacattgcacacaaaacatgatcacaccttttaaagttatatttaatatacatgtttaaggttaagacgcttaacgcggggataaaagggatttttcatgcaactttaagggagattgatttagcgcaattttggcggcagggatctaccgccagagaggtattacgcagagaaaaaggcgatgaggatcggcactaacaggctaagaataaaaccgtgaacaattgccgccgggaccatatccagcccgccagtacgttgaagaacgggcagggtgaaatccattgatgtggcaccgcataagcccagtgcagtagagcggctgcggcgaatcagcccagggatcaacataatagcaatcagttcacgggccagatcattaaaaaacgccgcgctcccgattaccggaccaaaagattcggtcaataaaataccggaaagagaataccagccgaaaccggaggccattgccagcgcggtattgatggggagatcaagaataaaggcgttaattaaaccaccaattaatgaactgacaaccaccaccacggcgacaatcattccccggcgattaaggacaatctgctttaaggtcatgccattattgcgcaactgaataccaacgaggaaaagtagcaaaattaacgtgtattcactggcttcggtcgcgtgttgtaagaaagccagtccactcagaccaatggcaaaaccaatcactactacgccgcacagttttagcgactccagcgccatcgcaatacgcgacgggagtttttcttgctgatggtggttgcgccacggcaggcctcgctccagccacatcagggcggcaatattacacagtaaaataacggtaatactgacggcagaataatgcagaatcgccaacaggttactggcgaggttatcgagaaacgccagactgatacccataaaaaagagaataaggtaaaccatccagcttaatagctgattaataacttttaacgcagcttgttggcgaagcggaatgaggtaacccacaatcaggggaaccagaatgattaacagcccagaaaacatgaaaatccagtccttgcaaagatgaagtcgaaatgcgcgatgacacactactgaaagcggaaggacgagtaaagttgcaattaaaaggaaatgttatgcataaggagcagtagagtattcgttttcatttaaagatattcttgcgctttaattacaaactgcaccgatgttggtggcgttaaaatcgccgaggcgttccctgaaggccggggcagcccacatggatgtgggctgagggcgcgttttacagggatgttacctcgcgcccgacccggtagccgtaagggataagtcgagggcaccgcgcagcggcgattttgttcgccagagcccgggggtgcatggggcggcggcgattggccgccccctgcgcgctccttgcgccagtggcaatatgtggcttagctcatgaaaggagcgcaacaagatgatgaatcaacatataacaacatcttaaaaaaaggcctgacattacgccaggccttctgcgttaattaatcacgcttttccagcagggtccggtaaatcagaccaccgataatgccgccgacaattggcaccacccagaagaaccacagttgttctaatgcccagccgccctggaagatagcaaccgcggtgctgcgcgccgggttaacagaagtgttagtcaccggaatactaattaagtgaatcagggttaaggccagaccaatagcgatcggcgcaaaacctgccggcgcgaatttgtcggttgcgccgtggatcaccaacaggaaacctgcactcaataccagttcaactaccagcgcggaaagcatggaataaccgcctggtgaatgctcgccataaccgttagaagcaaaaccgctggctgccgcgtcaaaacccgttttaccactggcaattaaatacagcagcgccgctgcaacaataccgccgacaacctgggcaattacgtagccaacgacttcttttgccggaaaacgtccgccagcccataaaccaatagtgaccgccgggttaaaatgaccaccagaaatatgaccaacagcaaaggccatcgtcagaacggtcagaccgaacgccagcgccacgccggcaaaaccaatgcctaattccgggaagcctgcggccagtacagcactaccacagccaccaaaaacaagccagaaagtaccaaaacattcagctgctaattttctgaacatatccacctcaattaaaaattgaccctgtgaaaaatatggtcgttttatagggtcgtcgtaaaaaagtgacgacggaaataatgcgcggctattttaaaaacgaaggcgagtcattcaccagataaataaatccagtaaatttgatttagggcaacagcgggttgccccatatagtcatttgtctgattgacagtgtagtgcaagcaaaagatttaatcctttaggcgtaataaaaaataatttatcatgctaattatttgattttgttgtttttgcagacttatcagcaagagggagtataacgcgattattcgctcatttttcagacatttgccatgcttaaatgtgatgtcatcacgtattagcaaggcctttcccgttatactgccagcgtaaaggataagtcacatatttctggaggggatatgattcttgagcgcgttgaaattgtgggttttcgcggtatcaaccgtttgtcgttgatgctcgaacaaaacaacgtcctgattggggagaacgcgtggggtaaatccagcttgctggacgccttaaccctgctgctatcgccagaatcagatctctaccattttgagcgcgacgatttctggttcccgccgggagatatcaacgggcgagaacatcatctgcatattattttgaccttccgcgaatcgctgccaggccgacatcgggttcgccgttatcggccgctggaagcgtgctggacgccatgcaccgatggctatcaccgtattttttatcgtctggaaggggagagtgcggaagacggcagcgtgatgacactgcgcagttttctcgataaagacggacatccgattgatgtcgaggatattaacgatcaggcacgccatctggtgcgtttaatgccggtgctgcgcttgcgtgatgcccgttttatgcgccgtattcgtaacggcacggtgccaaatgttcccaatgtggaagtcaccgcgcgccagctcgatttcctcgcccgtgagttgtcctcacatccgcaaaatctctctgatggacagattcgtcagggactttccgcaatggtgcagttgcttgagcattatttctctgagcagggggccggacaggcgcgatatcgtttaatgcggcggcgggccagcaatgagcaacgaagctggcgctatctggacatcatcaaccggatgattgaccgacctggagggcgctcgtatcgggttattttgctcggcctgtttgctactttattgcaggcaaaaggcacattgagactggataaagacgcgcgtccgttattgctaattgaagatccagaaacccgtttacaccccattatgctttcagttgcctggcatctgttgaatcttctgccattgcagcgcattgccaccaccaactcgggtgagttgctttcgttaacgccggtagagcatgtttgccgactggtacgtgagtcctcgcgcgttgccgcctggcgtctggggccgagtggcttgagtaccgaagatagccgacgcatatcctttcacattcgttttaaccgtccgtcatcgctgtttgctcgctgctggttgctggtggaaggggaaacggaaacctgggttatcaatgaactggcgcgccagtgtggacaccatttcgatgccgaagggatcaaggtcattgagtttgcccagtccgggctaaagccactggttaaatttgcccgccgaatggggattgaatggcatgtactggtcgatggcgatgaagcagggaagaaatatgccgctacggtacgcagcctgttgaataacgatcgggaagccgaacgagaacatttaacggcgttaccggcgctggatatggaacattttatgtatcgccagggattttccgatgtgttccaccgcgtggcgcaaatcccggaaaatgtaccgatgaatctgcgcaaaattatctcgaaagcgatccatcgctcttccaaacccgatcttgccattgaagtggcaatggaggccggacgtcgtggtgtggactccgtaccgacgctgctgaaaaaaatgttctcacgcgtgctgtggctggcgcgcggtcgcgcggattaaccgcgaaacatcgtggccatttgtggctgaatagcgtcgagcatctcatagcgccgacggtattcagcccgttttttactggcgatttcggcaatctcttttcgtgctatctgtgctggaaggcggtaatggcgttcagcatcacatacgccgccaaccgattcccagaaagcgttgtaatcggcatggatcttgccttctttatcacgataacgcaggctgcggtaaatatgcgtttcattgctgacggcaataatctgctctacctgcaaacgttgggcaaacagacaggccgcttccatcacgaggcgtttgggaaatagcccgtggcaggctttcgtcgcattctggatttcctgatgtggaatttcccattttgcgccttgcagtccgccaataaacatcgttcttttcccctgatattcacacagggtaaacgtgatctctgccagaggaataccttcgctgttgcgaaacaggattgtgctgtcaccttctttatccattgagatcatcatggtcagctcaagcgtgaactgctcgccgtttttgccttccagtttagccagttgcagcccgggggtattcaaatataagctgaattcttccgccgacatacatccgcggagtaacgcataatggtaacgtaacgcctccagcaattgcttacggctaagattcgccgcaaggtaagggcgatgcagacgcacaggcagtcgcggttggcgcgttaacaacacattgagattaggccagtgggaaagttcgttcatccactcaacgcttaaacgcggcataatcaacgagcgcagcaaaaatttctggcgaaaactacggcgatgccagaatttacccggccgacactgtccacgtgccagactaagaaaaagtgacaggctgctgagagattcagatggcgtaaaggtccgttcagttagctgcgacatattcatgaaatcaatggttatacatgacgtcgatttcaccattgcgtatcttaaccaaacatcaatagtgtgattactaacgtaaattttagggttttgttgatatttcgttgaagttaatgacccggattggcatatggagtattcagaatatttatgaaaaagcggaaaaccgtgaagaagcgttacgttattgcgctggtgatagtcatcgccggactgattacgttatggagaattcttaacgcacccgtgccgacttatcagacactgattgtgcgccccggtgatttacagcaaagcgtgctggcgaccggaaagctggacgcgctgcgtaaggttgacgtgggcgcgcaggtcagcggtcagttgaaaactctgtcggtggcgattggcgataaagtaaaaaaagaccagcttttaggggttattgatcctgaacaggctgaaaaccagattaaggaggtcgaagcaacgctgatggagctacgtgcgcagcggcagcaggcggaagcggagctgaaactggcgcgggtgacgtattcccgtcagcaacgtctggcacaaacgcaggcggtttcacagcaggatctcgacaccgccgcgacggagatggctgtgaaacaggcgcaaattggcaccattgacgcgcaaatcaagcgcaatcaggcctctctcgatacggctaaaaccaatctcgattacactcgcatcgttgccccgatggccggggaagtcacgcaaatcaccactctgcaaggccagacggtgattgccgcacaacaagcaccgaacattctgacgctggcagatatgagcaccatgctggtaaaagcgcaggtttctgaagcggatgtaatccacctgaagccggggcaaaaagcctggtttacggtacttggcgatccactgacgcgctacgaggggcaaatcaaggatgtactaccgacgccggaaaaggttaacgacgctattttctattacgcccgttttgaagtccccaaccccaatggtttgctgcggctggatatgactgcgcaagtgcatattcagctcaccgatgtgaaaaatgtgctgacgatccctctgtcggcgttaggcgatccggttggcgataatcgttataaagtcaaattgttgcgtaatggtgaaacacgcgagcgtgaagtgacgattggcgcacgtaacgataccgatgttgagattgtcaaagggcttgaagcgggcgatgaagtggtgattggtgaggccaaaccaggagctgcacaatgacgcctttgctcgaattaaaggatattcgtcgcagctatcctgccggtgatgagcaggttgaggtgctgaagggcatcaccctcgatatttatgccggtgagatggtagcgattgttggcgcttcaggttccggtaaatcgaccctgatgaatattctcggctgtctggataaggccaccagcggcacctatcgcgtcgccggtcaggatgttgccacactggacgccgatgcgctggcgcaactgcgccgcgagcatttcggctttattttccagcgttaccatttactttcgcatttaaccgccgagcagaacgttgaagtacccgccgtctatgccggtcttgagcggaaacagcggctgcttcgcgcccaggggttactgcaacgactggggctggaagaccgtacagagtattatccggcacagctttcgggtggtcagcaacagcgcgtcagcatcgcgcgggcattgatgaacggcggtcaggtaattcttgccgatgaaccaaccggcgcactggacagccattctggcgaagaggtgatggcgatcctgcatcagctgcgcgatcgcgggcatacggtgattatcgtcacccacgatccgcaggtcgctgctcaggccgagcgggtgatcgaaattcgcgacggcgaaattgtgcgcaatcctcccgccattgaaaaagtgaatgttgctggcgggacggagcctgttgtcaacacggtgtctggctggcggcagtttgtcagcggttttaacgaggcgctgacgatggcatggcgggcgctggcagcgaataaaatgcgtactttactgaccatgctggggattattatcggtattgcgtcggtggtttccattgtcgtggtgggtgacgccgccaaacaaatggtgctggcggatattcgttctattggtacgaatactattgatgtctatcccgggaaagattttggcgatgacgatccgcaatatcagcaggcgctgaagtacgacgacttaatcgccatccaaaaacaaccgtgggtcgcctcagccacacctgccgtctcgcaaaacctgcgcctgcgttataacaatgttgatgttgctgccagtgccaatggcgtgagcggcgattattttaatgtctatggcatgaccttcagtgaaggaaacacctttaatcaggagcagctgaacggtcgtgcgcaggtcgtggttctcgacagtaatactcgccgccagcttttcccccataaagcagatgtggttggcgaggtgattctggtcggcaatatgcccgccagagtcattggtgtggcggaagaaaaacagtcgatgtttggtagcagtaaagtgctgcgtgtctggctaccttacagcacgatgtccgggcgagttatgggccagtcgtggctgaactccattactgtcagggtaaaagaaggatttgacagcgccgaggcggaacagcaactcacgcgtttactttcactgcgccacggaaagaaggatttctttacctggaacatggacggcgtcttgaaaactgttgaaaagaccacacgtactttacaactgtttctgacgctggtggcggtgatttcgctggtggtgggcggtattggtgtaatgaatattatgctggtgtcagtgaccgagcggacgcgggaaattggcattcgcatggctgtaggtgcgcgagcaagcgatgttttgcaacagttcctgatcgaagccgtactggtttgcctggtgggtggcgcgttgggaataactctgtcactgttaattgctttcaccttgcagcttttcttacccggctgggagattggtttttcaccgttggcactgctgctggcgtttctctgctcgacggccaccgggattttatttggatggttacccgcacgaaatgcggcacgactggatccagtagatgctctggcacgagagtaatttttgagataaaaatgccagccgatcgggctggcattttgcctttaggatgtacacaatgagacagaagagctatgcgactgccgcttctacttcgacgggcacaataacactggcgtgattgccttttggcccctggtggacatcaaactgaacggattgtccagcttttagcgttctgtaaccatccatctgaatggtggaataatgagcgaaaatatcttcgccgccgccttcagggcagatgaaaccaaaccctttggcattgttgaaccacttaacagtacccttttccatgcttcgacatccttcgcaaatcttatacaagtaagatggaataaaccggggtcagagagggggctgttcaaaacctcgccaactctagaaatacaatttagagaattagggcgagccgtcaagcgtttgacaggggccagggggcaggtatgaatcaaaaatttgaagcagttaacgctattgacaggaatgtgacagatgtcgctgatgccaacgatagatgatagttatctatcatgtggagtagattggtcaggcaaataagctcttgtcagcggcagggcgttctgccgataaccgtaaccgaagatgataactgacaatgggtaaaacgaacgactggctggactttgatcaactggcggaagaaaaagttcgcgacgcgctaaaaccgccatctatgtataaagtgatattagtcaatgatgattacactccgatggagtttgttattgacgtgttacaaaaattcttttcttatgatgtagaacgtgcaacgcaattgatgctcgctgttcactaccaggggaaggccatttgcggagtctttaccgccgaggttgcagaaaccaaagtggcgatggtgaacaagtacgcgagggagaatgagcatccattgctgtgtacgctagaaaaagcctgaatgcaggcataaaaattgggggaggtgcctatgctcaatcaagaactggaactcagtttaaatatggctttcgccagagcgcgcgagcaccgtcatgagtttatgaccgtcgagcacttgttactggcgctgctcagtaacccatctgcccgggaggcgctggaagcgtgttctgtggatttggttgcgctccgtcaggaactggaagcctttattgaacaaaccacacccgttctgcctgccagtgaagaggagcgcgacacacagccgacgctgagttttcagcgtgtactgcaacgtgcggtcttccatgtccaatcctccggtcgcaatgaggtaaccggtgcaaacgttctggtcgctatctttagcgaacaggagtcgcaggcggcatatctgttgcgtaaacatgaagtcagccgtctcgatgtggtgaactttatctctcatggcacgcgtaaagacgagccgacacagtcttctgatcctggcagccagccaaacagcgaagaacaagctggtggggaggaacgtatggagaatttcacgacgaacctgaatcagcttgcgcgcgtgggcggaatcgacccactgattggtcgtgagaaggagctggagcgtgctattcaggttctctgccgtcgccgtaaaaacaacccgctgctggtgggggaatctggtgtcggtaaaaccgcgattgcggaaggtcttgcctggcgaattgttcagggcgatgtgccggaagtgatggctgactgtacgatttactctctcgatatcggttctctgttagcgggcactaaatatcgcggcgactttgaaaaacgttttaaagcgttgctcaagcagctggagcaggacactaacagcatcctgtttattgatgagatccacaccattatcggtgcgggggcagcgtctggtggccaggtcgatgcggctaacctgatcaaaccgttgctctccagcggtaaaattcgcgtaattggttcgacaacctatcaggagttcagcaacattttcgagaaagaccgtgctctggcgcgtcgcttccagaaaattgatattactgaaccgtcgatcgaagaaactgttcaaatcatcaatggcctgaaaccgaagtatgaagcgcaccacgacgtgcgttataccgcaaaagcggtgcgtgcagcggtagagctggcggtgaaatacattaacgatcgtcatctgccggataaagccattgacgttatcgacgaagcgggcgctcgcgcacgcctgatgccggtaagcaaacgcaagaaaaccgttaatgtggcggatattgagtccgtggtggcccgtattgcgcgcattccagagaagagtgtttctcagagtgaccgcgataccctgaaaaacctcggcgatcgcctgaaaatgctggtcttcggtcaggataaagccattgaggcgctgactgaagccattaagatggcgcgtgcaggtttaggtcacgaacataaaccggttggttcgttcctgtttgccggccctaccggggtcgggaaaacagaggtgacggtacagctttcgaaagcgttgggcattgagctgctgcgctttgatatgtccgagtatatggaacgccataccgtcagccgtctgattggtgcgcctccgggatacgttggttttgatcagggaggtttgctgactgatgcggtcatcaagcatccacatgcggtgctgttgctggacgaaatcgagaaagcgcatccggacgtgttcaatattctgttgcaggtgatggacaacggtacgctgaccgataacaacggacgcaaagcggacttccgtaacgtggtgctggtgatgaccaccaacgccggggtacgtgaaactgagcgtaaatccattggtcttatccaccaggataacagcaccgatgcgatggaggagatcaagaagatctttacaccggaattccgtaaccgtctcgacaacattatctggtttgatcatctgtcaaccgacgtgatccatcaggtggtggataaattcatcgtcgagttgcaggttcagctggatcagaaaggtgtttctctggaagtgagccaggaagcgcgtaactggctggccgagaaaggttacgaccgggcaatgggcgcacgtccgatggcgcgtgtcatccaggacaacctgaaaaaaccgctcgccaacgaactgctgtttggttcgctggtggacggcggtcaggtcaccgtcgcgctggataaagagaaaaatgagctgacttacggattccagagtgcacaaaagcacaaggcggaagcagcgcattaatctgattgttaggtaggttggtcaagtccgtaatctcgaaagaggttacggactttttgtttatggggtggaggaggttcagaccctttttttaatgatgatggtaagttgttgataattagtgctgcgggaaggtaaggataaaaaagggtgctgcaggagaatgggatggttttgctttattaacaacgggctaaacgtgtagtatttgagttcactgccgtacaggcagcttagaaatcgacggggtgcggtaaaacctttgcgaacgcgttcactgccgtacagacagataaaatgcgaaaaaaaagctcgcactttcgtacgagctcttctttaaatatggcggtgagggggggattcgaacccccgatacgttgccgtatacacactttccaggcgtgctccttcagccactcggacacctcaccaaattgttttgtcgcctgacctcatgggtggcaacggggcgctactatagggagttggagtaaaacggtcaagaagaattttaatgataattattgtttgctcatactgtaaacaagttgtgcagtatatctacatcgagacaagttacggacttatacttccaaagtacttcatacatatcacaaaataaaaaggccggttaaaccgaccttttactcgttctttctcttcgcccatcaggcggtaaaacaatcagcgactacggaagacaatgcggcctttgctcaggtcgtacgggtcagttcaacagtcactttgtcgcccgtcaggatgcggatgtagtttttgcgcattttaccggagatgtgtgcagtaaccacgtgaccgttttctaactctacgcggaacatggtattaggcaacgtttcaagaacggtaccttgcatttcaatattgtcttctttggccatctaatcctctggggtatcactaccgtaatttgaaccggcaagataatgccgaagttctgtaaataagtaaagatttgcgcgctaaatcgcaacaaacaggttcggcacattactccgaaaacacacggctaagccgcaccaaaagcgcaacgtataagggagcggtgagataaacgatgggcgttacctgacgcgaaaaattccttatcggcagcggggtaatgagcgtaaccaactctgcgaccgcaattataacactctggggagaaatgtgccgaaaacattcattcttgtggtgaaaacaagcatcgtggtacccagaaattattcggcaatcgtccgaggcgcatttgattgagataattaaggtaatcccggcggggaatttcgcaggcaccaagcgatgctgtgtgatcgttaaggacctggcagtcgataagcttaccgccatgaccgataaattcctcacagaataccagaagcgccgttttagacgcattttccatccggctgaacatggactcgccacaaaatagcgttccctgggccacgccgtacataccgccgacaagctcatcttcacgccagacttcaatggagtgggcatggccgagttcgtgaaggcgatggtaggcttcgaccacgccacgcgtgatccaggttccttcttcgcgatcgctggcacagccttcaatgacctgaccaaaagcgtaattcatcgtgacacgatagggcgagcgtttatgaaatcgcttcatactacggctgatatgcagtgattctggccatagcaccgcgcggggatcgggcgaccaccagaggatggggtcgcctggagaaaaccacggaaaaataccacgctggtaagccattaacaggcgcgcagggctaagatcgcccccaagtgccagcaggccgttaggctcacgtaatgcgccttccggggaagggaaggctattgaatggcgagaaagctgaaccaggcgcatgaccgcaaaactccacgcaagtcggatcgttcaataatagcttacaaaccctgcttgaactggtaataacgcccctgtctggcaagcagctctgcgtgagtaccttgctcaataatttgcccgttgtccatcactattatttgttggaaacgagagagtccgcgaagtcgatgggtgaccattaacaccgttttctcacgcatcatttctgcaagcaattcaaggatctggctttcggttgtggcatctaagccttcggtaggttcatccagcaacaccagtggcgcatcatgtaacagcgcacgggcgatagccagacggcgcagttcaccaccggagagctggcgtccgccttcacctaaccaactgttgagacctgcatcctcgagcagcttctccaggccaacgcgacgcaagctctccgccagagcctcatcactactgccaggcgaggcgagtaacagattatcacgcagcgtggcgctaaacagatgcactcgctgaggaacaacgctgatggtctgtcgtagagccgcttcattcaggctggctatggggctatcgttaagcaaaatctcgccctgttgcgggtcccaagcgcgggtcagcagttgtaacagtgttgatttgccgcatccggttcgcccgagaatcgcaatatgttccccggcgtttacctgaagagaaatccctttaagtgcctgttgggattgctccggataagtgaactgaacatcccgtaatgtcagcgaaacgcgatcggcaacacgagtttgggtatcagggaaggtgacttccggtttttgatccgttaaatcagtgatccgaacggcagaggcaatgacttgccccagatgctgaaatgcacccgttactggtgccagtgcttcaaacgcggctaacgcgcagaagacaaacagggcaattaacgcgccgggttgagcattgccgccaacgccgccagacgccatccacagcatcaggatcaccgctaacgcgccaatgagtagcattatcgcttgcgacaatgcggtcagttcagattgacggcgttgcgcttccagccattgaatttctgtattctctagttgcgtgcgataacgatcgctggcaccaaaaatggtcagctcagcttgcccttgcagccaggccgtcagttgttggcgatactgtccgcgaagatgagtcagattttgcccggtgctttttcccgcacgataaaacagcggtggcatcaggaaaagcgtcagtaacataatgccgcccagcgtaaaggcgagggtgaaatcaaggaaacttaacccgattgtcaccaccataatcaccacaaaagcgcccaccagcggcgagataacgcgcagataaagatgatcgagcgtatcaacatccgccaccacgcgattgagcaattcgccctgacgatagcgcgccagtccggcaggggagaggggcagcaatttgctgaaggtgtaaatgcgcagatgctgcaacacgcggaaagtcgcgtcgtgacttaccagacgttcaaaataacgcccggcagtacgggtgattgctgcgccacgcacgcccgcagcgggtagcatatagttgaagctgtacagtccggcaacccccgcaaccgctgaggccgagaggaaccagccggaaagtgtcaacagaccgatactggcgagcagcgtgacaattgccagcacgataccaagacttaacatccatttatgacgtttatacagtgccagatagggtagcaaagcgcgcatttaaatctcctcctgacgatgggccagtaatgtggcgaatgggccaccagccacacttaattccgcgtaacgtccttgctcaataatccggccatcctgcataacccaaatgacatcccagtcagcaagatcttctaactggtgggtgaccattaacgttgtctggcgcagagaggcggcattcagcgcctccattacgcgctgttcactgtgagcatcaaggctggcagcgggttcatccaacagtaatagcgaacagggatttagtaacgcacgggccaccgccacgcgctgcgcctgccccacggaaaggcgggcagcctggtcgccaacaggcgtatcaacgccttgtggcaggagcggtagaaactcgctgacccaggcgttatccagcgctgcttgtaattcttgttcgctggcatcaggtcgcgccagtagtacgttatcccgcaatgttgctgccggtaattgtgggttttgcccaacccaggagagatgtttacgccatgattctggtgataaatcgcgtaattctatcccgttgattcgtaatgatccctgatatgagagaaaaccagaaagcgcgttcagcagtgagcttttacctgaaccgctgcgaccaaccaacactgcacgttgacctgctggcaaagtaaagttcagcggtccggccagcgttttaccttccggcgacgtgataaacagatcctcggcctcaatggtcaccggatcggtcgatgctatttccgtctcaccgcgctgcggatgggcgagcggggtttccataaacgttttcagactgtcagctgcaccaacagcctgggctttagcatgataaaacgtaccgagatcgcgtaatggctggaaaaactctggcgcaaggatcagggccagaaaacccgcagccagcgtcacgccagtatcgtagtgaccaaaatccagctcgccgagataggaaaaaccaaagtagaccgccaccagagcaattgacagcgaggtaaaaaattcgagaatgccggaggataaaaacgccagccgtagcacttccattgtccgttggcggaaatcttccgaagcagaacgaatactttcaatttcagcttcaccacgaccaaaaatacgcaatgtttccatgccgcgcaggcgatcgaggaaatgcccacttaagcgagcaagagcgagaaagttacgccggttagcatcggcagcccccatcccaaccagcgccataaacaacggaattaacggtgctgtgcccagcagaatgagcgccgcagcccagttagaggggaagatcgccaccacaatcagcaacggcaccgacactgccagcgccatttgcggcaggtagcgtgcatagtaatcatgcatatcgtcaatttgctcgagtaccaacgtcgcccagctccccgcaggtttaccctgaatccacgctggccctgcttgttgcagacggtcgagaacctgacggcggatggcaaagcggatatgctgcccggcgtgataacccacccgttcgcgtaaccagaccacccatgcgcgcagtacaaaggtcagaaccagtaacgtaaagggaagcagcagggcttcacggggaatattctccataatcatatgttgcagaattcgcgccatgaaccaggcctgggcaatgatcaatatgccgcttacaaagcccagcagacgagaaatattcagccaacgttgggagatgacgctttgctgttttaaccagcgggttaactctttttgacgggatttattcattgcacgcttagcaggtgagttatcagaattatttgcagagcaatgttacaacggggaaaaaataaaggcgacccatagtcgcatggtgtcgccttctttacttttgttactgatttgtaaaattattttgcgtcagctaaaccatcgaggtagcgttccgcatcaagtgctgccatgcagcctgtaccggccgaagtaatggcctgacgataaatatgatccatcacgtcacccgcggcaaagacgccaggaatgctggtctgggtggcattaccatgaatacccgactgcactttgatgtagccgttttccagttccagctgcccttcgaaaatggcagtattcgggctgtgaccgatagcaacaaacagaccggcaacgtcgagtgactcgatgttatcgctgttttgcgtatcgcgcagacgaacgccagtgacacccatttgatcgccggtcacttcttccagcgtacggttggtgtgcagaatgatgttgccgttctccactttatccatcagacgcttaataaggattttttccgcgcggaaaccgtcacggcggtgaatcagatgcacttccgaagcgatgttagacagatacagcgcctcttcaaccgcggtattgccgccgccgatgaccgcaactttctggttgcgatagaagaaaccgtcgcaggttgcacaagcagaaaccccacggcctttaaaggcttcttcagagggcaggccgagatagcgtgcagaagctccggtggcaataatcagcgcgtcgcaagtgtattcgccgttatcgccattcagacggaacggacggttttgcagatccaccttgttgatatgatcaaaaatgatctcagtttcaaacttggtggcatgttcgtgcatgcgctccattaataacggaccggttagatcgtttggatcgccaggccagttttccacttccgtggtggtggtcagttggccgcctttttccatgccggtaatcagcacaggttgcaggttggcgcgcgccgcgtagacagcagcggtgtatcccgccgggcctgaacccaggataagcagtttactgtgtttggtcgtgcccatgagatccccatagttgttggcagacaatgggcaggattgtagggaatttacagacgtaaaaaagagtatgacgattttgttaacaatttgtgcaatcggcagcatcgataagcaggtcaaattctcccgtcattatcacctctgctacttaaatttcccgctttataagccgattaaatgatgaataaacgcccctgttaatgaatatctggcatgttgtactaaaaatcgatgttttgctttgacaatcccctggtgttttgcgaaaacattcgaggaagaaaaaaaacagtattcttatatgcgcataaccatgcatgtaaataccatgtttaccgtgctagtgaaatctacgtatggcgtggacagacgccattcgtgatgtcgatagctgccacaaggcaacggtcttctcaccgtagacccaggcattgcgcgccgtgaatcttcatgatttcggtctatcgtgacgggtagcgactctgaacagtgatgtttcagggtcagacaggagtagggaaggaatacagagagacaataataatggtagatagcaagaagcgccctggcaaagatctcgaccgtatcgatcgtaacattcttaatgagttgcaaaaggatgggcgtatttctaacgtcgagctttctaaacgtgtgggactttccccaacgccgtgccttgagcgtgtgcgtcggctggaaagacaagggtttattcagggctatacggcgctgcttaacccccattatctggatgcatcacttctggtattcgttgagattactctgaatcgtggcgcaccggatgtgtttgaacaattcaataccgctgtacaaaaacttgaagaaattcaggagtgtcatttagtatctggtgatttcgactacctgttgaaaacacgcgtgccggatatgtcagcttaccgtaagttgctgggggaaaccctgctgcgtctgcctggcgtcaatgacacacggacatacgttgttatggaagaagtcaagcagagtaatcgtctggttattaagacgcgctaacacggaacaggtgcaaaatcggcgtattttgattacactcctgttaatccatacagcaacagtactggggtaacctggtactgttgtccgttttagcatcgggcaggaaaagcctgtaacctggagagcctttcttgagccaggaatacactgaagacaaagaagtcacattgacaaagttaagtagcggccgtcgccttctggaagcgttgctgatccttattgtcctgtttgccgtctggttgatggctgccttactaagctttaacccttcggaccccagctggtcgcaaacggcctggcatgaacctatccataatttaggtgggatgcccggtgcgtggctggcagatacgctgttctttatttttggcgtgatggcttacaccattcccgtcattattgtcggcggttgttggtttgcctggcgtcatcagtccagtgacgaatacattgattattttgccgtttcgctacgcatcattggcgttttggcgctcatccttacctcctgtggtctggcggcaatcaacgctgacgatatctggtattttgcctccggtggcgtcattggcagcttactaagcactacgctacaaccactgctacacagtagcgggggaactattgcgctgctctgcgtttgggctgcgggcctgacgctgttcaccggttggtcatgggtgaccattgctgaaaaactcggcggctggattttaaacattctcaccttcgctagtaatcgtacccgtcgcgatgatacctgggtcgatgaagatgaatatgaagatgacgaagagtatgaagatgaaaaccacggcaaacagcatgaatcacgccgtgcccgtattcttcgcggcgcgctagcgcgtcgtaaacggttggcggaaaaattcattaatccgatggggcggcaaacagacgctgcgttgttctccggtaagcggatggatgatgacgaagagattacctacactgcacgcggtgtggctgccgacccggacgacgtcctattttcgggcaatcgtgcaacgcagccagaatatgacgaatacgatccattattaaacggtgcgccaattaccgaacctgtcgctgtggcagctgctgctaccacggcgacacaaagctgggctgcgccggttgaacctgtgactcagacgccgcctgttgcctctgttgatgttccaccttcgcaacctacagtagcctggcagcctgtaccgggtccacaaacgggagagccggttattgctcctgcaccggaaggttacccacagcagtcacaatatgcgcagcctgcagtgcaatataatgagccgctgcaacaaccagtacagccgcagcagccgtattatgcacctgcagctgaacaacctgcgcaacaaccttactacgctcctgcggcggaacaacctgttcagcaaccgtattacgcccctgcgccagaacaaccggtggcaggtaacgcctggcaagccgaagagcagcaatccacttttgctccacagtctacataccagactgagcaaacttatcagcaaccagccgctcaggagccgttgtaccaacagccgcaatccgttgaacagcagcctgttgtggagcctgaacccgttgtagaagagacaaaacccgcgcgtccgccgctttactattttgaagaagtggaagagaagcgagcccgtgaacgtgaacaacttgcggcctggtatcaaccgattccagaaccggttaaagaaccagaaccgatcaaatcttcgttgaaagcgccttctgttgcagcagtacctccagtagaagccgctgccgctgtttctccgctggcatctggcgtgaaaaaagcgacactggcgacgggggctgccgcaaccgttgccgcgccagtcttcagtctggcaaatagcggtggaccgcgtccgcaagtcaaagaggggattggcccgcagttgccacgaccgaaacgtatccgcgtgccaactcgtcgtgaactggcgtcttacggtattaagctgccctcacagcgtgcggcggaagagaaagcccgtgaagcccagcgcaatcagtatgattctggcgatcagtataacgatgatgaaatcgatgcgatgcagcaggatgaactggcacgtcagttcgcccagacacagcagcaacgctatggcgaacagtatcaacatgatgtgcccgtaaacgcagaagatgcagatgctgcggcagaggctgaactggctcgtcagtttgcgcaaactcaacaacaacgttattccggcgaacaaccggctggggcgaatccgttctcgctggatgattttgaattttcgccaatgaaagcgttgctggatgatggtccacacgaaccgttgtttacgccaattgttgaacctgtacagcagccgcaacagccggttgcgccacagcagcaatatcagcagccgcaacagccggttgcgccgcagccgcagtatcagcagccacaacagcaggttgcgccgcagccacaatatcagcagccgcaacaaccggttgcgccacgagccgccagtatcagcagccgcaacaaccggttgcgccgcagccgcagtatcagcagccgcaacaaccggttgcgccgccgcagcagtatcagcagccacaacagccagttgcgccacaaccgcaggataccctgcttcatccgctgttgatgcgtaatggcgacagccgtccgttgcataaaccgacgacgccgctgccttctctggatttgctgacaccgccgccgagcgaagtggagccggtagatacctttgcgcttgaacaaatggctcgcctggtggaagcgcgtctggctgatttccgtattaaagccgatgtcgtcaattactctccggggccggttatcactcgctttgaacttaacctggctcctggcgtaaaagcggcgcgcatttctaacttgtcacgggaccttgcccgttcactttcgacggtggcggtgcgtgtcgttgaagttattcctggcaaaccctatgtaggtctggagttaccaaataaaaaacgacaaaccgtttatctgcgcgaagttttggataacgccaaattccgcgataatccgtcgccattaaccgtggtgctgggtaaagatatcgccggtgagccggtggttgccgatctggcgaaaatgccgcacttgttggttgcggggactaccggttccggtaaatctgtcggtgtgaacgcgatgatcctgagcatgctttataaagcacagccagaagatgtgcgtttcatcatgatcgacccgaaaatgctggagctttcggtttatgaaggcattccgcatctgttaacggaagtcgttactgatatgaaagatgccgccaacgcgctgcgctggtgtgttaacgagatggagcgtcggtataaactgatgtctgcgctgggtgtgcgtaatctggcgggttataacgaaaaaattgctgaagccgatcgcatgatgcgtccgattccagacccgtactggaagccgggtgacagtatggatgcccagcatccggtgctgaaaaaagaaccatacattgtggtgttggttgacgaatttgccgacctgatgatgacggtaggtaaaaaagtggaagagctgatagcacgtctggcgcaaaaagcccgtgccgcgggtatccacctcgtactggcaactcagcgtccatcggttgatgttattactggtctgattaaagcgaatattccgacccgtatcgcctttaccgtatccagtaagattgactcacgtaccattcttgatcaggctggcgcggaatcactgctggggatgggggatatgctctactctgggccgaactccacgttgccggtacgtgtccatggtgcttttgttcgcgatcaggaagttcatgccgtggtgcaggactggaaagcgcgtggtcgcccacagtatgttgatggcatcacttccgacagtgaaagcgaaggtggcgcgggcggtttcgatggcgctgaagaactggatccgttgttcgatcaggcggtgcagtttgtcactgaaaaacgcaaagcgtcaatttctggcgtacagcgtcagttccgcattggttataaccgtgcagcgcgtattatcgaacagatggaagcgcaggggattgtcagcgaacaggggcacaacggtaatcgtgaagtgctggccccaccgccgtttgactaattaatgcattgccggataaggcgcggtagcgtcgcatccggcactctatcaactgaaaattcagtattttcttctttcctcaagctgattattagcctggaatagagagtagagggaactcccgatcgggagtgacgtaatttgaggaataatgatgaaaaaaattgccatcacctgtgcattactctcaagcttagtagcaagcagcgtttgggctgatgccgcaagcgatctgaaaagccgcctggataaagtcagcagcttccacgccagcttcacacaaaaagtgactgacggtagcggcgcggcggtgcaggaaggtcagggcgatctgtgggtgaaacgtccaaacttattcaactggcatatgacacaacctgatgaaagcattctggtttctgacggtaaaacactgtggttctataacccgttcgttgagcaagctacggcaacctggctgaaagatgccaccggtaatacgccgtttatgctgattgcccgcaaccagtccagcgactggcagcagtacaatatcaaacagaatggcgatgactttgtcctgacgccgaaagccagcaatggcaatctgaagcagttcaccattaacgtgggacgtgatggcacaatccatcagtttagcgcggtggagcaggacgatcagcgcagcagttatcaactgaaatcccagcaaaatggggctgtggatgcagcgaaatttaccttcaccccgccgcaaggcgtcacggtagatgatcaacgtaagtagaggcacctgagtgagcaatctgtcgctcgatttttcggataatacttttcaacctctggccgcgcgtatgcggccagaaaatttagcacagtatatcggccagcaacatttgctggctgcggggaagccgttgccgcgcgctatcgaagccgggcatttacattctatgatcctctgggggccaccgggtaccggcaaaacaaccctcgctgaagtgattgcccgctatgcgaacgctgatgtggaacgtatttctgccgtcacctctggcgtgaaagagattcgcgaggcgatcgagcgcgcccggcaaaaccgcaatgcaggtcgccgcactattctttttgttgacgaagtgcaccgattcaacaaaagccagcaggatgcatttctgccacatattgaagacggcaccatcacttttattggcgcaaccactgaaaacccgtcgtttgagcttaattcggcactgctttcccgtgcccgtgtctatctgttgaaatccctgggtacagaggatattgagcaagtactaactcaggcgatggaagacaagacccgtggttatggtggtcaggatattgttctgccagatgaaacacgacgcgccattgctgaactggtgaatggcgacgcgcgccgggcgttaaatacgctggaaatgatggcggatatggccgaagtcaatgatagcggtaagcgggtcctgaagcctgaattattgaccgaaatcgccggtgagcgaagcgcccgctttgataacaaaggcgatcgcttttacgatctcatttccgcactgcataagtcggtacgtggtagcgcacccgatgcggcgctctactggtatgcgcgaattattaccgctggtggcgatccgttatatgtcgcgcgtcgttgcctggcaattgcttccgaagatgtcggcaatgccgacccacgggcgatgcaggtggcaattgcggcctgggattgctttactcgcgttggcccggcggaaggtgaacgcgccattgctcaggcgattgtttacctggcctgcgcgccaaaaagcaacgctgtctacactgcgtttaaagctgcgctggcggatgctcgcgaacgtccggattatgacgtgccggttcatttgcgtaatgcgccgacgaaattaatgaaggaaatgggctacgggcaggaatatcgttacgctcatgatgaagcaaacgcttatgctgccggtgaggtttacttcccgccggaaatagcacaaacacgctattatttcccgacaaacaggggccttgaaggcaagattggcgaaaagctcgcctggctggctgaacaggatcaaaatagccccataaaacgctaccgttaatgttatcgttgcggtaatgttgttactgtatccctgtggtcgcaggctgtggccacatctcccatttaattcgataagcacaggataagcatgctcgatcccaatctgctgcgtaatgagccagacgcagtcgctgaaaaactggcacgccggggctttaagctggatgtagataagctgggcgctcttgaagagcgtcgtaaagtattgcaggtcaaaacggaaaacctgcaagcggagcgtaactcccgatcgaaatccattggccaggcgaaagcgcgcggggaagatatcgagcctttacgtctggaagtgaacaaactgggcgaagagctggatgcagcaaaagccgagctggatgctttacaggctgaaattcgcgatatcgcgctgaccatccctaacctgcctgcagatgaagtgccggtaggtaaagacgaaaatgacaacgtcgaagtcagccgctggggcaccccgcgtgagtttgactttgaagttcgtgaccatgtgacgctgggtgaaatgcactctggcctcgactttgcagctgcagttaagctgactggttcccgctttgtggtaatgaaagggcagattgctcgcatgcaccgcgcactgtcgcagtttatgctggatctgcataccgaacagcatggctacagtgagaactatgttccgtacctggttaaccaggacacgctgtacggtacgggtcagctgccgaaatttgctggcgatctgtttcatactcgtccgctggaagaagaagcagacaccagtaactatgcgctgatcccaacggcagaagttccgctgactaacctggtgcgcggtgaaatcatcgatgaagatgatctgccaattaagatgaccgcccacaccccatgcttccgttctgaagccggttcatatggtcgtgacacccgtggtctgatccgtatgcaccagttcgacaaagttgaaatggtgcagatcgtgcgcccggaagactcaatggcggcgctggaagagatgactggtcatgcagaaaaagtcctgcaactgctgggcctaccgtaccgtaaaatcatcctttgtaccggcgacatgggctttggcgcttgcaaaacttacgacctggaagtatggatcccggcacagaacacctaccgcgagatctcttcctgctccaacgtttgggatttccaggcgcgtcgtatgcaggctcgttgccgcagcaagtcggacaagaaaacccgtctggttcataccctgaacggttctggtctggctgttggtcgtacgctggttgcagtaatggaaaactatcagcaggctgatggtcgtattgaagtaccagaagttctgcgtccgtatatgaacggactggaatatattggctaatacccaatttttctgaatctaaaaagcgcctgcgggcgctttttttgtctccctttgataccgaacaataattactcctcacttacacgtaatactactttcgagtgaaaatctacctatctctttgattttcaaattattcgatgtatacaagcctatatagcgagctgctatagaaataattacacaatacggtttgttactggaatcaatcgtgagcaagcttgagtgagccattatgaaaacgaaaatccctgatgcggtattggctgctgaggtgagtcgccgtggtttggtaaaaacgacagcgatcggcggcctggcaatggccagcagcgcattaacattaccttttagtcggattgcgcacgctgtcgatagcgccattccaacaaaatcagacgaaaaggttatctggagcgcctgtacagttaactgtggtagtcgctgcccgctacgtatgcacgtcgtggacggtgaaatcaaatatgtcgaaacggacaataccggcgatgacaattacgacggcctgcaccaggttcgcgcctgtctgcgtggacgttccatgcgtcgccgtgtctataatccggaccgcctgaaatatccgatgaaacgagtcggggcgcgcggtgaaggcaaatttgagcgcattagttgggaagaagcctacgacatcatcgcgaccaatatgcagcgcctgatcaaagagtacggcaacgaatccatctatctgaactatggcaccggtacgctgggcggcaccatgacccgctcctggcccccgggaaataccctggtcgcgcgcctgatgaactgctgcggcggttatctgaaccattacggtgactactcttccgcgcaaattgcggaaggtttgaactatacctacggcggctgggcagatggtaacagcccgtcggatatcgaaaacagtaaactggtagtgctgtttggtaataaccctggcgaaacgcgaatgagtggcggtggggtgacttactatcttgaacaggcacgccagaaatctaatgcccgcatgatcatcatcgatccgcgctataccgacaccggtgccgggcgcgaagatgagtggatccctattcgtccgggaacagatgccgcactggttaacggtctggcgtacgtcatgatcactgaaaacctggtggatcaggcattcctcgataaatattgcgttggctacgatgagaaaaccctgccagccagtgcgccgaaaaatggccactataaagcttatattctgggtgaagggccagatggcgtggctaaaacaccggaatgggcctcacaaatcaccggtgttccggcagacaaaatcatcaaactggctcgtgaaatcggcagtaccaaaccggcgtttatcagccagggatgggggccacagcgccacgccaacggcgaaatcgcgactcgcgctatctcgatgctggcgattctgaccggtaacgtcggcattaacggcggtaacaccggcgcgcgtgaaggttcctatagcctgccgtttgtccgtatgccgaccctcgaaaacccgatccagaccagcatttctatgtttatgtggaccgatgccattgaacgtggcccggaaatgacggcgctacgtgatggtgtgcgcgggaaagataagctggatgtgccgatcaaaatgatctggaactatgccggtaattgcctgattaaccagcattctgaaatcaaccgtacccatgaaatccttcaggatgataagaagtgcgagctgattgtggttatcgactgccacatgacctcatcggcgaaatatgctgacatcctgctgcctgactgcaccgcttccgaacagatggactttgcactggatgcatcctgcgggaatatgtcttacgtgattttcaacgatcaggtgattaaaccgcgctttgaatgtaaaaccatctatgaaatgaccagcgaactggcaaaacgtcttggcgttgagcaacagtttactgaaggccgtacacaggaagagtggatgcggcatctgtatgcccagtcgcgggaagcgattcctgaactgccaacgtttgaagagttccgcaagcaggggatctttaaaaagcgcgacccacaagggcatcacgttgcttataaagccttccgtgaagatccgcaggcaaacccactgactacgccatcgggcaaaattgagatttattcgcaggcgctggctgacattgccgctacctgggaattgccagaaggcgatgtgatcgatccactgccgatctacacgccgggctttgaaagttatcaggatccgctgaacaaacagtatccgctgcagcttacgggtttccactataaatctcgcgttcactcaacttacggcaacgttgatgtgctgaaagcggcttgccgtcaggaaatgtggatcaacccgcttgatgcgcaaaaacgcggtatcaacaacggcgataaagtcaggatctttaacgatcgtggtgaagttcatattgaggcgaaagtgacgccacgaatgatgccgggtgtggtcgcactgggtgaaggtgcctggtatgacccggatgcaaaacgtgtcgataagggcggttgtattaacgtactgaccactcaacgtccgtctcctctcgctaaggggaatccgtcacatacaaaccttgttcaggttgaaaaggtgtaaggagtaaccgatgacaacccagtatggattttttattgattccagccgttgcaccggttgcaaaacctgcgagctggcctgtaaagactacaaagatttgacgccagaagtcagcttccgccgcatttatgaatatgctggcggcgactggcaggaagataacggtgtctggcaccagaacgtgtttgcctactatctgtcgatttcatgtaaccactgcgaagatccggcttgtactaaagtctgcccgagcggtgcgatgcataaacgtgaagatggttttgttgtggtcgatgaagatgtgtgcattggctgccgctactgccatatggcttgcccgtatggcgcaccgcaatataacgaaacgaaaggccatatgaccaaatgcgatggttgttatgaccgtgttgcggagggtaaaaagccgatctgtgttgaatcttgtccgctgcgggcgctggatttcggccctatcgacgagctgcgtaaaaaacatggcgatctggcggccgttgcgccgttgccgcgagctcactttaccaaaccgaatattgtgatcaaacccaatgccaatagccgcccgaccggggataccactggctatctggcaaacccgaaggaggtgtgagatgggaagtggatggcatgaatggccgctgatgatcttcacggtcttcgggcaatgtgtagcaggtggttttatcgttctggctttggcgctgctcaaaggcgacctgcgagcagaagcccagcagcgtgttatcgcctgcatgtttggtttatgggtgctgatgggcattggctttatcgcctctatgctccatcttggttcaccaatgcgcgcttttaactcgctcaaccgggtaggggcttcagcactcagtaacgaaatcgccagcggttcgatcttttttgccgtaggcggcatcggctggttgctggcaatgctgaaaaagctgtcaccggcattgcgtacgctgtggctgatagtgacgatggttcttggcgtcatctttgtctggatgatggtgcgtgtgtataacagcattgataccgttccgacctggtacagcatctggacgccgatgggcttcttcctgacgatgtttatgggcggcccgttactgggttacctgttgttgagtctggctggcgtcgatggctgggcgatgcgtctgctgccagcaatttctgtactggcactggtagtgagtggcgtggtgtcagtgatgcagggcgcagagctggcgactattcatagttctgtgcagcaggccgcagcgctggtgccggactatggtgcgctgatgtcctggcggatcgtgcttttggccgttgccctgtgcttgtggattgcaccacagctaaaaggttatcagcctgcggttccgctactatccgtctcattcattctgcttctggcaggggaattaatcggtcgcggcgtattctatggtttgcatatgaccgtggggatggccgtcgcaagctaatcagtaacaaccggggtttcggccccggttctcttttatttctgcttcgttaacgtgtcataactggtcatcaaattacgataatcaggaatgtggttagagaacaacgtcgccagtccttcaatatcattacgccagtcgcgatgcagctcgcacgccacgccgaaccatgtcatcaattgcgcaccagcttgcgacatgcgatcccatgccgaatgccgggtaatttcattaaaggtccctgacgcgtcagtcacgacaaagacgtcaaacccttcttcaatggctgaaagcgccgggaatgccacgcaaacttcggttaccacaccggcaataattaactgttttttacctgtcgctttgacagcttttacaaaatcttcgttatcccaggcgttaatatttcccgggcgagcaatgtaaggtgtatcggggaattgtgctttcagttctggaactaatgggccgttaggaccggtttcaaaactggtggtaagaatagttggtaagttgaaatacttagccaggtcacccagcgccagcacgttatttttaaacttatcaggttcgatatcccgtacaagggaaagtaaaccagcctggtgatcaacaagcaaaacggcagcatcatttttatcaagacgaacatacggtttggtcatcctcttctcctttcgagagtcagtggtacgtctgaaatcgatcagacgcgatgcattgctctgaaagcatagacgggaaatatgagtttgctgtgaccatgaaatttttcgactgaacgaagcgtatgaaatttgtgttagttcaataaaaacaatcagatgagactaatcatctcttcagcattagcgttatgaatgagtaatataaatcgataataccgccgctgggatatcgcgtattttcacccattgacaatgtttttggcggtggcatgatgcgcatgaaatttgaacttcctcacggttttaattcatgtccacgtatacccggcctgtcatgcttttgctgtctggcctgcttttgttgactctggcgattgcggtgttaaatacactcgtgccgctttggctcgcccaggaacacatgtccacatggcaggtaggcgttgtcagctcatcctattttaccggcaaccttgtcggtacattgctgacagggtatgtcattaagcgcattggctttaaccgcagctattatctggcctccttcatttttgccgctggctgtgccggccttggcctgatgattggattctggagctggttggcttggcgttttgtcgcgggcgtcggctgtgccatgatttgggtggttgttgagagcgcgctgatgtgcagtgggacgtcacgtaaccgtgggcgtttgcttgctgcgtatatgatggtttattacgtgggaacgtttttaggccagttactggtcagcaaagtttcaaccgagctgatgtccgtattgccgtgggttacaggtttgacgttggcagggatcttaccgctgttgtttacgcgtgtgctgaatcagcaggctgaaaaccatgattcgacgtcaattacgtcaatgctaaaactccgtcaggcgcggcttggcgtgaatggctgcattatctcaggaatcgttctgggatctctatatggcctgatgccgctgtacctcaatcacaaaggggtgagcaatgccagcattggtttctggatggcggtactggtcagtgcgggtatccttggacaatggccgattggacgtctggcggataagtttggtcgactgctggtgttgcgtgttcaggtctttgtcgtcattctcggcagtatcgcgatgcttagccaggcggcgatggccccagcgttattcatcctcggtgccgctggctttacgctatatccggtggcgatggcatgggcttgcgagaaagttgaacatcatcaactggtggcgatgaaccaggccttactgttgagctatactgtgggaagtctgcttggcccgtcatttaccgctatgctaatgcagaatttctccgataatttattgtttatcatgatcgccagcgtatcgtttatctatttgctgatgctgctgcgcaacgccggtcatacgccgaaacccgttgctcacgtgtaaatgaattcaagcagagtgtgaacctactgtttcacactctgcttttttgtttcttctatctgacttgctttattccaaattttattcgtttaaaaataaaatgtgcagcaggttataattttgcatttcgctatttccgcacttcttatttgccgcgcataatccctcgttttacagatgcccctttaattttggcgaaggatttgtctatggctgggaatgttcaggaaaaacagctgcgatggtacaacattgcgctgatgtcttttatcactgtctggggttttggcaacgttgttaataactacgccaaccaggggctggtggttgttttttcatgggtgtttatctttgcgctctatttcacaccttatgcgctaattgttggtcagttaggctcgaccttcaaagatgggaggggcggggtcagtacctggattaaacacacgatgggacccggactggcttacctcgccgcgtggacctactgggtagtgcatattccctatctggcacaaaaaccccaggcaatactgattgcgctcggttgggcgatgaaaggcgacggttcgttaatcaaagaatattcagtcgtagcgttacaggggttaacgctggtgctgtttatcttctttatgtgggttgcttcacgcggtatgaaatcgctgaaaatcgtcggttctgtggcagggattgcgatgtttgttatgtcgctcctgtatgtggcgatggcggtaaccgcgcctgcaattactgaagtgcatattgcgaccacaaacattacctgggaaacgttcattcctcatatcgactttacctacattaccactatttcaatgctggttttcgcggttggcggagcagagaagatttctccttacgttaatcaaacgcgcaacccaggaaaagaatttccaaaagggatgttatgcctggcggtgatggttgcggtttgtgccattctgggctcgctggcgatggggatgatgtttgattcgcgtaatatcccggatgacttaatgaccaacggtcagtattacgcctttcagaagctgggcgagtattacaacatgggtaatactttaatggtgatttacgccattgcgaataccctgggacaagtagcggcgctggtattctcgattgatgccccgcttaaagtgctattaggtgatgctgacagcaaatatattccagccagtttatgtcgtaccaacgcttctggtacgcccgttaatggctattttctgaccctggtactggtggcgattctgattatgctgccgactctcggcattggtgatatgaacaatctctataaatggctgttgaaccttaattcggtagtgatgccgctgcgttatttatgggtatttgttgcatttattgcagtcgttcgcctggcgcagaaatataaaccagaatatgtctttattcgtaataagcctctggcaatgaccgtcgggatttggtgttttgcctttaccgcctttgcctgtttgacggggatcttcccgaaaatggaagccttcactgcagagtggaccttccagttggcgctgaatgttgcaacgccgtttgtgctggtaggattaggactgattttcccgctgctggcgcgtaaagcgaatagtaaataattattgtggtcggtgacgctgactctggcagatctgacccgtttttacataatcgagaaatgcgcgcaagccgcaggacatatactggcggtttggataatagatctggaagcctggacgctctgtgctccagtcttccagtacacattctaaacgaccagtatcaaggtactccttgatctgttcatagagcagatacccgataccagcacccatcaaaacggcctccagttcagcatcaacatcatccagaatgatatttcctgcgacagcaatttccagctcctttgcaaattgccagtggaaaggtttgccgctgggataacgaaaaacaacacattgatgattaagcagatcatgaggatggcggggtttgccatatcttgcaaagtactctggcgttactgctacacataatttcactggcgggccgatcgccacgctgatcatatctttttcgacgatgccactaagtcgaacgccagcgtcaaagccctgttggacgatatcgacaagagagtcgtcagttgtgagctcgactttaatatcaggatattcacgtgtgaaaccaaccagtaaaggcattaaaaatatacgtgcagctacccgggcggcattgattttgagcgttcctgtcggtgtcagacgaaaatcattcatctcatctaacatgatctgaatttcgtcgaaagctgggcgcaatcgttcatagagattagaacccgcttccgttaacgatacgcttcgggttgtccgattgaataagcgaattttaagacgttgttccagtgttttaatactatggctaatggcggacgaggataagcctaactcatcgcccgctgcacgaaagctttgattacgggccacggcaaagaaagtggcaaagtcagacatattcatccgcattagtgaaaatccttcattaactcatcctgaatcatcacgtttacaggattatgccgcctgcgtaaagtgcgctccagaacttaacgtggaggtaaaattatgcagtctgaacgtatttatttggtatgggcccatcctcgtcatgattcattgaccgcacatattgctgatgcgatccatcagcgggcaatggagcggaaaatacaggtgacggaactcgatttatatcggcgtaatttcaacccagtgatgacgccggaagatgaaccagactggaagaatatggataaacgttattctccagaggttcatcagctttattcagagctgcttgaacatgacacgttagtggtggtttttcctctctggtggtacagcttcccggcaatgctaaaaggatatattgacagagtatggaataatgggctggcttatggagatgggcacaaattaccattcaataaagttcgttgggtggcgctggttggaggagacaaagaatcatttgtccagatgggctgggaaaaaatataagcgattatttaaaaaatatgtgcagttatcttggtattgaagatgccgatgtcactttcttgtgtaatacagtggtattcgatggggaagaacttcacgcgagctattatcagtcgttattatctcaggaacgggatatggtagatgcactataagatgtgttaaaaacgctgtagcagaatgaagcgcggaataaaaaagcggcaactcaataaagttgccgctttacggggaaattagaacattaccttatgaccgtactgctcaagaatgcctttcacgcgttccatggtctctttcttcggtggtttaacaccgtcgagtttgtactcttcacccattgccacccatttgtgtttgcccagctcgtggtaggggagaagctcgattttctcaacgttgcccatatcacgggtaaattcaccgaggcgatgcgctgaatcgtcatcgtcagaccagcctgggacaacaacgtagcggatccacaccttcacatttttgttcgccagatatttagcgaactccagcgtgcggtggttggaaactccaaccagattttggtggatctcgtcgttcatctgtttgagatcgagcattaccaggtcggttacttccagcagttcatcaatcaccggatcgtaacgacgaacaaaaccgttggtgtccagacaggtatgaatgccttcttttttgcaggcgcggaaccagtcacgaacaaactcagcttgcaggattgcttcaccgccggatgcggtaacgccgccgccggaagcgttcataaagtggcgataggtcaccacttccttcatcaaatcttcaacggtaacttctttaccgccatgcgtgtcccaggtgtcgcggttatgacaatacaggcagcgcatcaggcagccctggaaaaaggtgataaagcgaatacctgggccgtctacggttccacaggattcaaaggagtgaatgcgaccaataactgacattgcggtgtttctccagatgtggcccatctgaggccgtgttggtgcgcagctcgaaggctacgtcgagtctgttttggcagtcaccttaaagtatagatagctgacaaaaaaggctctcgtgctaaaaaaggccccactttcgtggagcctttattgtacgctttttactgtacgatttcagtcaaatctaattacatagattgagtgaaggtacgagtaataacgtcctgctgctgttctttagtcagcgagttgaaacgtactgcgtagccagatacacggatggtcagctgcggatatttttccgggttttccatcgcgtcgagcagcatttcacggttcatcacgttaacgttcaggtgctgaccaccttcgatggatgcttcgtggtggaagtaaccatccatcagacctgccaggttggtcttacgaacttcgtcgtctttacccagtgcgttcggaacgatagagaaggtgtaggagataccatctttagcgtaagcaaacggcagtttagcaacggaagtcagagacgctacagcacctttctggtcacgaccgtgcatcgggttagcacccggtccgaacggcgcgccagcacgacgaccgtctggggtgttaccagttttcttaccatacacaacgttagaagtgatggtcagaacagactgagtcgggatagcgtcacggtaggtgtgcagtttctgaattttcttcatgaaacgttctaccaggtcaacagccaggtcatctacacgcggatcattgttaccaaactgcgggtattcgccttcgatttcgaagtcgatagccagaccgtcttcgtcacgaatcggtttaactttcgcatatttgattgcagacagggagtcagcagcaacggacagaccagcgataccacacgccatggtgcggataacgtcacggtcgtgcagcgccatcagagaggcttcgtagctgtacttgtcgtgcatgtagtggatgatgttcagtgcagtgatgtactgtttagccagccagtccatgaagtgatccatgcgctccatcacttcatcgtagttcaggagatcgcctttgatcggttcagacttcggaccaacctgcattttcagtttttcgtcaacgccgccgttgattgcgtacagcatggttttcgccaggtttgcacgcgcaccgaagaactgcatttgtttaccaacgatcatcgggcttacgcagcaagcgatagcatagtcatcgttgttgaagtccggacgcatcaggtcatcgttctcatactgcagagaagaggtgtcgatggacactttagcggcgaatttcttgaagttcagcggcagtttttcagaccacagaatggtcatgttcggttccggagacggacccatggtgtacagggtgttcaggaaacggaagctgtttttggtaaccagggtacgaccgtcgaggcccataccaccgatagattcggttgcccagatcgggtcgccagagaacagttcatcgtactccggagtacgcaggaagcgaaccatacgcagtttcatgaccaggtggtcaaccatttcctgcgcttcttgttcggtgatcttgccagctttcaggtcacgttcgatgtacacatccaggaaggtggaggtacgaccgaaggacattgcagcaccgttctgagacttaacagcagccaggtagccgaagtaagtccactggatagcttcctgagcgttggtagccggaccagagatgtcgtagccgtatttcgcagccatttctttcatctgacccagagcgcggtgctgttcagcgatttcttcgcgcagacggatagtctgttccaggtttacgccgttttccagatcagcctgcagagaggtgaactgagcgtatttgtctttcatcaggtagtcgataccgtacagcgcaacgcgacggtagtcaccgatgatacggccacggccataagcatctggcagaccggtcagaacaccggatttacggcaacgcaggatgtccggagtgtaaacgtcgaacacgccctggttgtgagttttacggtattcagtgaagatttttttgatcatcgggtccagttcgcggttgtacgctttgcaggaaccctcgatcattttgataccaccgaacgggataagagcacgtttcagcggagcttcagtctgtagaccaacaactttttccaacgctttgttgatgtagccagcgtcgtgagaggtgatggtggaagcaacagcggtgtcaaagtcaactggcgcgtgagtgcggttttccagtttaacgccttccattactttgtcccacagggtggtggtcgcttcagtagcgccagccaggaaggactcgtcaccctcgtacggagtgtagtttttctgaatgaagtcacggacgtttacttcattctgccagtcacctttggtaaaaccttcccaggctgtggctaacttttcattaagctcggacatgtaacacctaccttcttaagtggattttttatttactgcgtacttcgacaaccattaatggtgatcgttttcacgcaggtaaatgacccagtatgtcaacccaaccaacaaaccaccgccgataatattaccgatcgtaaccggaatcaggttatcagtgatgaagttcatcacggtcaggtgagaaaaattttccggtgcagaaccgaccgcggtccagaattccggagatgcgaagtcgcggattacaatacccatcgggatcataaacatgtttgcgatactgtgctcaaaaccgctggcaacaaacatcgcgaccggcagcaccataatgaacgctttgtccatcaggctgcggccagaataactcatccatactgccagacataccatcaggtttgccaggataccaagacagacggcctcaataaaagtatggtgcactttgtggtcggcggtttgtaggacgtttagtccccattgaccatttgcggtcatatactcgccggaaagccacattaaaagtacaaacagcagtgcgccgaccaggttgccaaaatagacatttagccagtttttcgccaactgaccccaggtgatgcgcccactcgccttagcaacaacaatcaacacggtggaagtaaagagatcggctccgcagacaacacaaagaatcagccccagagagaagcaaatgccgccaaccagttttgccatgccgaagggcattgtgcctgtgccagtggttgctgtgatatagaagacgaatgcgattgagatgaaaacaccggcggtaatcgccagatagaaagtcttaagcggatgtttcgttgctttatagacacccgcctcttcggccactttggccattgcagcaggaagtaaaagatcaaaagggttgtcagctttcacactaactctctctttattaagtcggcgacgagatactaacaaagcattatagatgagaaattgatatagatcatatctcgcctggcttataggcccgtaactcgcatggtttttatgcaaatacggagtaaatatttgattatccaaataaaaataaattttaaaaattaacaaatgagttgaattttttccgcatcctccgctaaaacagttaattaaaagggagcatcaggcgaataaagtaacaatatcgatcgtatttattaaatacaaattaccgatatttaaccttataattacaattattttattaatgcaaatatatgtaaagcggggcattaaaaaacgccccgtaatataactcagactaatcattaagcctacattgcgtaggctatttgattttattttgcccagaatgctgctttggcgcgctgcagcttttcgtaggccttcaacaacgactgatgtgcagcaaacgcgtgcagatcgctatctaccggttgcaggccgtaaaacgccgcttcgccgctcattgccgcactggcggcttctacggcatctgcgccgtacatgcgaacaaacgcattcagatattgcagcggctggcgatcttcttcctgtgccagtaataacaacgtttgcaggcagcgataatagttggcgcgttccggactaaatactgatgagttaaactccatcgtccattcggtccagaccagagcctgttccagatcgccaccagccagcgccagcatggcttttaattcaccgatacgcagggtgtaccaaccgttatccgacccggtcgccagacccaacagctcacgcacgcgggtaaagtcatcaaaaccttcttcatccagttgctcgatgaggttcaggtaatcttctttttcccactcgctgcctggtagcgaaagaatcgtttcacgtaaatggctgcccatactgttattcgcgagccacagatcttcagccggataaatatcggacatgccaggcacgataatacggcaagcataaacgcccagatgctcgtaatcggcaatataaacttctttatcttctttgttgaagatagccatcagtgtggcgaactcttcttccgtggtgccggagaaattccagtccacaaacggataatcggcatcctgcttgaacaggtcccaggagattaaaccgctggaatcgataaagtgcgtttcgaggttggtatgttcagcgacttcttcatcatcgaaggttggcggagtaaacacatccaaatctttcaggccacgaccttgcagcagctcggtcacggtacgttccagtgctacgccaaaatcaggatgcgcaccgaaagaggcaaagcaggtaccgttagcaggattgaacagtaccacgcaaatcaccggatactggccgccaagcgaaccgtcataagcgaagattgggaaaccctccgcttccagcgtttcgatggcttcaactactgctgggtaacgcgccagcacgtctgccgggatctctggcaggctgatgctttcagcaataatgcggtttttcacgtagcgttcgaaaacttcagacaatccctgaacgcgtgcttcgttgcgggtattacctgcggacataccgttggagacgtacaggttaccaatgatattcatcggaatataaacggtctgattgtcggactgacgcgtaaacggcaggccgcaaataccacgatcttcgttaccggattgtaggtcaatcagcatgctgccggtcagttcattctccggatcataaaacgcgcgcagacggtcatcgagtagtccttctggcacatcgtcattttcggtcagtgggaaccatttttcgttgggataatgcacgaacggaccgttggcgatggtttcgcccagccagaaatcagcaaaaaagtagttggttgagagacgctcgaaatattcaccaagtgcagaagccagcgccgcttttttggttgcgcctttaccgttggtaaaacacagtgcgcactctttgtcgcgaatatgtacagaccagacgttaggcacaggattcagccaggaggcctcttcaatctgaaagccgaggtctgaaagtttttgctggaagcgagcgatggaatcttccagagcggcatctttgccggggataaatgtttgcgtcatgaaaatcactttagtcgtacggaaagcgcgcaataatacgggttttatctcaaaggcgctatcaccgccgccatgccgatgaactgttgactatgcttttagcggataaaccacgataagagcataaaaatgaaggcgttcgatctccaccgtatggcatttgataaagtgccttttgatttccttggcgaagttgcactacgtagtctttatacctttgtactggtttttctgttcctcaaaatgaccggaagacgcggtgtgcgacagatgtcgctgtttgaagtgttaatcattctcacgctgggttcagcggcgggagatgtggcgttttatgatgatgtgccgatggtgccggtacttatcgtctttatcactctggcgttgttataccgcctggtaatgtggttgatggcgcacagtgaaaaactggaagatttactggaaggtaagccggttgttattattgaagatggcgagctggcctggtcgaaactcaataactccaacatgacggaatttgagttctttatggagctacgattgcgtggcgtagagcagctggggcaggtacgtctggcgattctcgaaaccaacgggcaaatcagtgtctatttctttgaagatgacaaggtgaaaccgggtttacttattttacccagtgattgtacgcagcgttacaaagtggtgccggagtcggcggactatgcctgtattcgttgtagtgaaatcattcatatgaaagcgggggaaaaacaattatgtccgcgctgtgcaaatccagaatggacgaaggcaagtcgggcaaaacgggtgacctgacagtaaaaacatcggctttttgctaataatccgagagattcttttgtgtgatgcaagccacatttttgccctcaacggttttactcattgcgatgtgtgtcactgaatgataaaaccgatagccacaggaataatgtattacctgtggtcgcaatcgattgaccgcgggttaatagcaacgcaacgtggtgaggggaaatggctcaaatcttcaattttagttctggtccggcaatgctaccggcagaggtgcttaaacaggctcaacaggaactgcgcgactggaacggtcttggtacgtcggtgatggaagtgagtcaccgtggcaaagagttcattcaggttgcagaggaagccgagaaggattttcgcgatcttcttaatgtcccctccaactacaaggtattattctgccatggcggtggtcgcggtcagtttgctgcggtaccgctgaatattctcggtgataaaaccaccgcagattatgttgatgccggttactgggcggcaagtgccattaaagaagcgaaaaaatactgcacgcctaatgtctttgacgccaaagtgactgttgatggtctgcgcgcggttaagccaatgcgtgaatggcaactctctgataatgctgcttatatgcattactgcccgaatgaaaccatcgacggtatcgccatcgacgaaacgccagacttcggcaaagatgtggtggtcgccgccgacttctcttcaaccattctttcccgtccgattgacgtcagccgttatggcgtgatttacgctggcgcgcagaaaaatatcggcccggctggcctgacaatcgtcatcgttcgtgaagatttgctgggcaaagcgaatatcgcgtgtccgtcgattctggattattccatcctcaacgataacggctccatgtttaacacgccgccgacatttgcctggtatctatctggtctggtctttaaatggctgaaagcgaacggcggtgtagctgaaatggataaaatcaatcagcaaaaagcagaactgctatatggggtgattgataacagcgatttctaccgcaatgacgtggcgaaagctaaccgttcgcggatgaacgtgccgttccagttggcggacagtgcgcttgacaaattgttccttgaagagtcttttgctgctggccttcatgcactgaaaggtcaccgtgtggtcggcggaatgcgcgcttctatttataacgccatgccgctggaaggcgttaaagcgctgacagacttcatggttgagttcgaacgccgtcacggttaatgccgaaattttgcttaatccccacagccagcctgtggggtttttatttctgttgtagagagttgagttcatggaatccctgacgttacaacccatcgctcgtgtcgatggcactattaatctgcccggttccaagagcgtttctaaccgcgctttattgctggcggcattagcacacggcaaaacagtattaaccaatctgctggatagcgatgacgtgcgccatatgctgaatgcattaacagcgttaggggtaagctatacgctttcagccgatcgtacgcgttgcgaaattatcggtaacggcggtccattacacgcagaaggtgccctggagttgttcctcggtaacgccggaacggcaatgcgtccgctggcggcagctctttgtctgggtagcaatgatattgtgctgaccggtgagccgcgtatgaaagaacgcccgattggtcatctggtggatgcgctgcgcctgggcggggcgaagatcacttacctggaacaagaaaattatccgccgttgcgtttacagggcggctttactggcggcaacgttgacgttgatggctccgtttccagccaattcctcaccgcactgttaatgactgcgcctcttgcgccggaagatacggtgattcgtattaaaggcgatctggtttctaaaccttatatcgacatcacactcaatctgatgaagacgtttggtgttgaaattgaaaatcagcactatcaacaatttgtcgtaaaaggcgggcagtcttatcagtctccgggtacttatttggtcgaaggcgatgcatcttcggcttcttactttctggcagcagcagcaatcaaaggcggcactgtaaaagtgaccggtattggacgtaacagtatgcagggtgatattcgctttgctgatgtgctggaaaaaatgggcgcgaccatttgctggggcgatgattatatttcctgcacgcgtggtgaactgaacgctattgatatggatatgaaccatattcccgatgcggcgatgaccattgccacggcggcgttatttgcaaaaggcaccaccacgctgcgcaatatctataactggcgtgttaaagaaaccgatcgcctgtttgcgatggcaacagaactgcgtaaagtcggtgcggaagtagaagaggggcacgattacattcgtatcactccaccggaaaaactgaactttgccgagatcgcgacgtacaatgatcaccggatggcgatgtgtttctcgctggtggcgttgtcagatacaccagtgacgattcttgatcccaaatgtacggccaaaacatttccggattatttcgagcagttggcgcggattagccaggcagcctgaatgaacaacgggcaataaatagccaaatctttctttatcaaaacgtcggcacattgtcggcgttttttttcggaccttgtgagtcattttgattaatggtagcgtcgcttgtcaatgtaagttgttgatacataatatttatatatgattaatcaacggatgattcacatgaagaatactaaattactgctggcgattgcgacctctgcagcattactgacagggtgtcaaaatacccacggtattgataccaatatggctatcagctccggtttaaatgcctataaagcagcaacattaagcgatgccgatgcaaaagcgattgccaatcagggctgtgccgaaatggacagcggcaatcaagtcgcaagtaaatccagcaagtacggtaaacgtctggcaaaaatcgccaaagcattgggtaacaatattaatggcacgccggtcaactataaggtttatatgaccagcgacgtcaacgcatgggcgatggcgaacggctgtgtccgtgtctacagtggcctgatggacatgatgaatgacaacgaaattgaaggtgttctgggccatgaactgggccacgtcgcgttgggtcactcgctggctgaaatgaaagcttcttatgcgatcgttgccgcacgcgatgccatttcagctaccagcggtgtggcttcccagctttcccgctcacaattgggtgatatcgcagaaggcgctattaatgctaaatactcccgtgataaagagtccgaagcagatgatttctcctttgatctgttgaagaaacgtggcatcagcacccaggggctggttggcagctttgaaaaactggctagtctggatggcggtcgcacccagtccatgtttgactctcacccaccatcaacagagcgtgcgcaacacatccgtgatcgtatcgcctctggtaagtaaatcattgtcatctttcgggctggtcttctgccagcccgctataattgcgcaataaatccccatctgaatacagacaaaactggtttttgcacacaacgttaacgatttgtggcgtcggcgcgtataatgcgcgcggttatgttaacggtacgcctgttttaaggagataaagatgacggcaattgccccggttattaccattgatggcccaagcggtgcagggaaaggcaccttgtgtaaggctatggcggaagcattgcaatggcatctgctggattcgggtgcaatttatcgcgtactggcattggcggcattacatcaccatgttgatgttgcgtcagaagatgcgctggtaccgctggcatcccatctggatgtacgttttgtgtcaaccaatggcaatctggaagtgatcctcgaaggggaagatgtcagcggcgaaattcgtactcaggaagtggcgaatgcagcttcacaagtcgcggcattcccacgcgttcgtgaagcattattgcgtcgccaacgcgcgtttcgcgaattacccggcctgattgccgatggccgcgacatgggaacggtggtattccctgatgcgccagtgaaaattttccttgacgcctcctcggaagaacgtgcgcatcgccgcatgctacagttgcaggagaagggctttagtgttaactttgagcgccttttggccgagatcaaagaacgcgacgaccgcgatcgtaaccgagcggtagcgccactggttccggcagccgatgctttagtgttggattccaccaccttaagcattgagcaagtgattgaaaaagcgctacaatacgcgcgccagaaattggctctcgcataagcgaccgaatttgcagtacccccgttgcaatggaatgacagcgggtatgttaaacaaccccatccggcatggagccaggtggacgttaaatataaacctgaagattaaacatgactgaatcttttgctcaactctttgaagagtccttaaaagaaatcgaaacccgcccggggttctatcgttcgtggcgttgttgttgctatcgacaaagacgtagtactggttgacgctggtctgaaatctgagtccgccatcccggctgagcagttcaaaaacgcccagggcgagctggaaatccaggtaggtgatgaagttgacgttgctctggacgcagtagaagacggcttcggtgaaactctgctgtcccgtgagaaagctaaacgtcacgaagcctggatcacgctggaaaaagcttacgaagatgctgaaactgttaccggtgttatcaacggcaaagttaagggcggcttcactgttgagctgaacggtattcgtgcgttcctgccaggttctctggtagacgttcgtccggtgcgtgacactctgcacctggaaggcaaagagcttgaatttaaagtaatcaagctggatcagaagcgcaacaacgttgttgtttctcgtcgtgccgttatcgaatccgaaaacagcgcagagcgcgatcagctgctggaaaacctgcaggaaggcatggaagttaaaggtatcgttaagaacctcactgactacggtgcattcgttgatctgggcggcgttgacggcctgctgcacatcactgacatggcctggaaacgcgttaagcatccgagcgaaatcgtcaacgtgggcgacgaaatcactgttaaagtgctgaagttcgaccgcgaacgtacccgtgtatccctgggcctgaaacagttgggcgaagatccgtgggtagctatcgctaaacgttatccggaaggtaccaaactgactggtcgcgtgaccaacctgaccgactacggctgcttcgttgaaatcgaagaaggcgttgaaggcctggtacacgtttccgaaatggattggaccaacaaaaacatccacccgtccaaagttgttaacgttggcgatgtagtggaagttatggttctggatatcgacgaagaacgtcgtcgtatctccctgggtctgaaacagtgcaaagctaacccgtggcagcagttcgcggaaacccacaacaagggcgaccgtgttgaaggtaaaatcaagtctatcactgacttcggtatcttcatcggcctggacggcggcatcgacggcctggttcacctgtctgacatctcctggaacgttgcaggcgaagaagcagttcgtgaatacaaaaaaggcgacgaaatcgctgcagttgttctgcaggttgacgcagaacgtgaacgtatctccctgggcgttaaacagctcgcagaagatccgttcaacaactgggttgctctgaacaagaaaggcgctatcgtaaccggtaaagtaactgcagttgacgctaaaggcgcaaccgtagaactggctgacggcgttgaaggttacctgcgtgcttctgaagcatcccgtgaccgcgttgaagacgctaccctggttctgagcgttggcgacgaagttgaagctaaattcaccggcgttgatcgtaaaaaccgcgcaatcagcctgtctgttcgtgcgaaagacgaagctgacgagaaagatgcaatcgcaactgttaacaaacaggaagatgcaaacttctccaacaacgcaatggctgaagctttcaaagcagctaaaggcgagtaattctctgactcttcgggatttttattccgaagtttgttgagtttacttgacagattgcaggtttcgtcctgtaatcaagcactaaggcggctacggccgcccttaatcaatgcagtaacagcagccgcttaatttgcctttaaggaaccggaggaatcatgaccaagtcagaattgatagaaagacttgccacccagcaatcgcacattcccgccaagacggttgaagatgcagtaaaagagatgctggagcatatggcctcgactcttgcgcagggcgagcgtattgaaatccgcggtttcggcagtttctctttgcactaccgcgcaccacgtaccggacgtaatccgaagactggcgataaagtagaactggaaggaaaatacgttcctcactttaaacctggtaaagaactgcgcgatcgcgccaatatttacggttaagtttttactcaaacttgaacgcgagaaaagcacctgtcgggtgcttttttcatttctctaatcaggaactggaagctgcctcgcagagttttgagcagttttcaccctttcgttaaattcttctgaatgtgcctcggggaacgcaaaattcccaccagacaaccgctcaacaaagttgcacactttccataaacagggaggggtgcatgaaaataacgacagtcggtgtatgcataattagcggaatttttccgttgctgattttgccccaattgcctgggacattaacccttgcgtttctgactctcttcgcctgcgtactggcatttatccctgttaaaaccgtccgttatatcgcgctgacgttgctgtttttcgtttggggcatattatcagcaaagcaaattttgtgggcaggagaaaccttaactggcgcgacgcaggatgcaattgttgagatcactgcaactgacggcatgaccactcattacggtcaaattactcatctacaaggtcgacgtatattccctgcgtcaggtctcgtgatgtatggcgaatatcttccgcaagcggtttgtgctggacaacaatggtcaatgaaactcaaagttcgtgcagttcatggccaacttaatgatggcggctttgatagccagcgttatgccattgcccagcatcagccgctcaccggccgttttctgcaggcaagtgtcattgaaccgaattgtagcctgcgtgcacagtatctggcgtcactacaaacaacgctgcaaccctatccgtggaatgcggttattcttggtttaggtatgggggaacggttatccgtccccaaagaaatcaaaaatatcatgcgcgatactggaacggcgcatttaatggcgatatcgggattgcacatcgcttttgcggcgttgctggctgccggactcattcgcagtggacaaatttttctgcctgggcgctggatccactggcaaataccattaattggcggaatctgctgtgctgctttttatgcctggttgacgggaatgcaacctcctgcattgcgtaccatggtggcgcttgctacgtggggaatgcttaagttaagtgggcgacagtggagtggctgggatgtatggatatgttgtctggcggcaattttgctgatggatcctgttgccattctctcgcaaagtttatggctctctgccgctgcggtcgcggcattgatattttggtatcagtggtttccctgtcctgagtggcaactgccgccggtattgcgtgcagttgtttccctcatccatctgcaactgggaatcacacttctgcttatgcccgtgcaaatcgtcatatttcatggcattagtctgacctcgtttattgcaaatctattagcaattcccttggtgacatttatcacggttccgttgatcctcgccgcgatggttgtgcatttaagcgggccgttaatcctggagcaagggttatggtttcttgccgaccggtctttggctttacttttctgggggttaaagagtttgccagaagggtggatcaacattgctgaacgttggcaatggctatcattttccccatggttcttactggtggtatggcgattaaacgcctggcgaacgttgccagcaatgtgtgtggctgtaggcttgctgatgtgctggccgctgtggcaaaaacctcgacctgacgagtggcaggtgtacatgcttgatgtcgggcaagggctggcaatggtgatagccagaaacggcaaagcgattctctatgacacaggactggcctggcccgaaggggatagtgggcaacaactgattatcccctggctccactggcataatcttgaaccggaaggcgttattctgagtcatgaacatctggatcaccggggagggctggactcaatattgcacacatggccgatgttatggatcagaagtccgttaaactgggaacatcatcagccctgtgtgcgtggcgaagcgtggcaatggcaaggattgcgtttcagcgtgcactggcctttacaagctagcaacgataaaggaaataaccattcctgtgtggttaaggttgatgacgggacgaatagcattcttctaaccggtgatattgaagtccccgctgaacaaaagatgctaagccgttactggcagcaagtgcagacaacattgcttcaggtacctcaccatggcagtaatacctcatcatcgttgccattaattcagcgagtgaatggaaaagtggcactcgcatcggcatcgcgctataacgcatggcgattgccctctaataaagttaagcatcgctatcaacagcaaggatatcaatggcttgatactccacatcagggtcaagtgacggtcaatttttcagcgcaaggctggcggattagcagcctcagagagcaaattttacctcgttggtatcatcagtggtttggcgtgccagtggataacgggtagaatatgcggctatttcaacaaatgctggttttttgaatgcataacgacaaagatctctctacgtggcagacattccgccgactgtggccaaccattgcgccttttaaagcgggtctgatcgtggcgggcgtagcgttaatcctcaacgcagccagcgataccttcatgttatcgctccttaagccacttcttgatgatggctttggtaaaacagatcgctccgtgctggtgtggatgccgctggtggtgatcgggctgatgattttacgtggtatcaccagctatgtctccagctactgtatctcctgggtatcaggaaaggtggtaatgaccatgcgtcgccgcctgtttggtcacatgatgggaatgccggtttcattttttgacaaacagtcaacggggacgctgttgtcacgtatcacctacgattccgaacaggttgcttcttcttcttccggcgcactgataacggttgtgcgtgaaggtgcgtcaatcatcggcctgttcatcatgatgttctattacagttggcaactgtcgatcattttgattgtgctggcaccgattgtttcgattgcgattcgcgtagtatcgaagcgttttcgcaacatcagtaaaaacatgcagaacaccatggggcaggtgaccaccagcgccgaacaaatgctgaagggccacaaagaagtattgattttcggtggtcaggaagtggaaacgaaacgctttgataaagtcagcaaccgaatgcgtcttcaggggatgaaaatggtttcagcctcttccatctctgatccgatcattcagctgatcgcctctttggcgctggcgtttgttctgtatgcggcgagcttcccaagtgtcatggatagcctgactgccggtacgattaccgttgttttctcttcaatgattgcactgatgcgtccgctgaaatcactgaccaacgttaacgcccagttccagcgcggtatggcggcttgtcagacgctgtttaccattctggacagtgagcaggagaaagacgaaggtaagcgcgtgatcgagcgtgcgactggcgacgtggaattccgcaatgtcacctttacttatccgggacgtgacgtacctgcattgcgtaacatcaacctgaaaattccggcagggaagacggttgctctggttggacgctctggttcaggtaaatcaaccatcgccagcctgatcactcgtttttacgatattgatgaaggcgaaatcctgatggatggtcacgatctgcgcgagtataccctggcgtcgttacgtaaccaggttgctctggtgtcgcagaatgtccatctgtttaacgatacggttgctaacaacattgcttacgcacggactgaacagtacagccgtgagcaaattgaagaagcggcgcgtatggcctacgccatggacttcatcaataagatggataacggtctcgatacagtgattggtgaaaacggcgtgctgctctctggcggtcagcgtcagcgtattgctatcgctcgagccttgctgcgtgatagcccgattctgattctggatgaagctacctcggctctggataccgaatccgaacgtgcgattcaggcggcactggatgagttgcagaaaaaccgtacctctctggtgattgcccaccgcttgtctaccattgaaaaggcagacgaaatcgtggtcgtcgaggatggtgtcattgtggaacgcggtacgcataacgatttgcttgagcaccgcggcgtttacgcgcaacttcacaaaatgcagtttggccaatgatcgaaaaaatctggtctggtgaatcccctttgtggcggctattgctgccactctcctggttgtatggcctggtaagtggcgcgatccgtctttgctataaactaaaactgaagcgcgcctggcgtgcccccgtaccggttgtcgtggttggtaatctcaccgcaggcggcaacggaaaaaccccggtcgttgtctggctggtggaacagttgcaacagcgcggtattcgcgtgggggtcgtatcgcggggatatggtggtaaggctgaatcttatccgctgttattgtcggcagataccacaacagcacaggcgggtgatgaacctgtgttgatttatcaacgcactgatgcgcctgttgcggtttctcccgttcgttctgatgcggtaaaagccattctggcgcaacaccctgatgtgcagatcatcgtaaccgacgacggtttacagcattaccgtctggcgcgtgatgtggaaattgtcgttattgatggtgtgcgtcgctttggcaatggctggtggttgccggcggggccaatgcgtgagcgagcggggcgcttaaagtcggttgatgcggtaatcgtcaacggtggtgtccctcgcagcggtgaaatccccatgcatctgctgccgggtcaggcggtgaatttacgtaccggtacgcgttgtgacgttgctcagcttgaacatgtagtggcgatggcggggattgggcatccgccgcgcttttttgccacgctgaagatgtgtggcgtacaaccggaaaaatgtgtaccgctggccgatcatcagtctttgaaccatgcggatgtcagtgcgttggtaagcgccgggcaaacgctggtaatgactgaaaaagatgcggtgaaatgccgggcctttgcagaagaaaattggtggtatttgcctgtagacgcacagctttcaggtgatgaaccagcgaaactgcttacgcaactaacctcgctggcttctggcaactagttacgccgcggcagcgttcgattgatggagtcatgaatgtcgctgccgcacctctcccttgctgatgcgcgtaatcttcaccttgccgcacaaggcctgttaaacaaaccccgccgtcaagcgtcgttggaggatattccggcaacgatctcccgcatgtccttgctgcaaatcgataccatcaatattgttgcccgtagtccatatctggtgcttttcagtcgtctgggaaattatcctgcccagtggctggatgagtctctggcgcgtggcgaattaatggaatactgggcgcatgaagcctgctttatgccgcgtagcgactttcgtcttattcgccaccgcatgctggcacctgaaaaaatgggctggaaatacaaagacgcctggatgcaggaacatgaggcggaaattgcacagttaattcagcatattcatgataaggggccggtacgttcagccgattttgagcatcctcgtaaaggtgcaagcggctggtgggaatggaagccgcataaacggcatctggaaggtttatttactgccggaaaggtgatggtgattgaacggcgcaacttccagcgcgtttatgatttaacccaccgtgtcatgcctgactgggatgatgagcgcgatctcgtttcgcaaacagaagcagaaatcatcatgctggataacagtgcgcgtagcctgggaatattccgcgaacagtggctggcagattactatcggctgaaacgtccggcactggcggcgtggcgcgaagcgagggctgaacagcaacaaatcattgctgtgcatgttgaaaaattgggcaatctttggctgcatgctgatttgctgccgctactcgagcgtgcgctggccggaaagctcactgcaacgcacagcgcggtactttcgccttttgatcctgttgtctgggatcgcaaacgcgcagagcagctttttgattttagctaccggctggagtgctataccccagcgccgaaacgccagtatggctattttgttctgccattattacatcgtgggcaattagttgggcgaatggatgccaaaatgcatcgccagacaggcatccttgaagttatctctctgtggttacaggaaggcattaaaccaacgacaatgctgcaaaaagggttacgtcaggcgattactgatttcgcgagctggcagcaggcaacgcgggtgacattaggacgctgcccgcaaggtctctttactgattgccgcactggctgggaaatagaccccgtcgcataaatgattatgataagatttatgcattcataacccgatccatctggaggaactatggatcatcgtctgcttgaaatcattgcctgcccggtttgcaacggaaaactttggtataaccaagaaaaacaagaacttatttgcaaactggacaacctggctttcccgctgcgtgatggcattccagtgttgctggaaacggaagcccgcgtgctgactgctgatgagagtaaatcatgagttttgtggtcattattcccgcgcgctacgcgtcaacgcgtctgcccggtaaaccattggttgatattaatggcaaacccatgattgttcatgttcttgaacgtgctcgcgaatcaggtgccgatcgcatcatcgtggcaaccgatcatgaggatgtcgcccgcgccgttgaagccgctggcggtgaagtatgtatgacgcgcgccgatcaccagtcagggacagaacgcctggcggaagttgtcgaaaaatgcgcattcagcgacgacacggtgatcgttaatgtgcagggtgatgaaccgatgatccctgcgacaatcattcgtcaggttgctgataacctcgctcagcgtcaggtgggtatggcgactctggcggtgccaatccacaatgcggaagaagcgtttaacccgaatgcggtgaaagtggttctcgacgctgaagggtatgcactgtacttctctcgcgccaccattccttgggatcgtgatcgttttgcagaaggccttgaaaccgttggcgataacttcctgcgtcatcttggtatttatggctaccgtgcaggctttatccgtcgttacgtcaactggcagccaagtccgttagaacacatcgaaatgttagagcagcttcgtgttctgtggtacggcgaaaaaatccatgttgctgttgctcaggaagttcctggcacaggtgtggatacccctgaagatcttgagcgcgttcgcgctgaaatgcgctaatttcacttcacgacacttcagccaattttgggaggagtgtcgtaccgttacgattttcctcaatttttcttttcaacaattgatctcattcaggtgacatcttttatattggcgctcattatgaaagcagtagcttttatgagggtaatctgaatggaacagctgcgtgccgaattaagccatttactgggcgaaaaactcagtcgtattgagtgcgtcaatgaaaaagcggatacggcgttgtgggctttgtatgacagccagggaaacccaatgccgttaatggcaagaagctttagtacgcccggaaaagcccgacaactggcatggaaaaccaccatgctggcaagaagtgggactgtccgtatgccgactatttatggtgtgatgacgcatgaagaacaccccggccccgatgtcctgctactggagcggatgcgtggtgtttcggtggaggcaccagcccgaacaccagaacgctgggaacaactcaaagaccaaatcgttgaagccttactggcctggcaccgtcaggacagtcgcggttgcgtcggcgcggtcgacaatactcaggaaaatttctggccctcatggtaccggcaacatgttgaagtgctatggaccacgctcaatcagttcaataacaccggtctgacgatgcaggataagcggatcctgtttcgcactcgcgaatgtctcccggcattatttgaaggctttaacgacaattgtgtgttgattcacggtaacttctgtttacgcagcatgctgaaagattcgcgcagcgatcagttactggcgatggtcgggccgggactaatgctttgggcaccgcgagaatacgaactgttccgactaatggataattctctggcggaagatttgctctggagttacctgcaacgcgcgccagtggcggagtcgttcatctggcggcgttggttgtatgtgttatgggatgaagttgcgcaactggttaataccggacgatttagtcggcgcaacttcgatctggcatcaaaatcactcttgccgtggctcgcctgacggacctttcagccactgccagatgcggccaagcgtttcatagccaacacgatcgctatgcatcagccagaccggagaagggattgcccgttcccacggattaagcggcgagtcgatggccaactgattcgccggggctggtagcggatttaacccttcctgctgaaaaaagatcatcgcccgcggcagatgtgatgcggaggtcaccagcaggaaaggggcgtcaccaatcgcctgtttcactgccgcagcttcttcttcggtatcttttggcaaatccagggtgataatttgctcgcgcggcacgcccagcgattgcgcaactctggcacctacttccgctgtactcaccgtattggtttttgctacgcctcccgtgaagatcagttttgatcccggattttcgcgccataagcgaataccttcattcaggcgtggcagactgttattgattaaattagagctcggtgcccactgcgggttccaggtataaccacctccgagcaccacgatatagtccactttttgcgaattattccatgtcggataggtgctttcgatgggacgcagcaggcggtcggctaccggttgcaaactcaataacaagagtgccagccacccaatgctaataaaaatcttcccggttttttgaaaacggctaaaccacagcagcgccaggccagcgccaataattaacaacatcagcggaagtggcagcaacatattgccaatcacttttttcagtgtaaaaagcatcctttctggttccttttttaaccatatagcaagggatcgccagcgatattacaccagacgggttcattctcgccgtggctgtgacaaaatagcgtctttatcagaaaacgtcttagccaaccggtggagaaagcaatgcaggatcgcaattttgatgatattgcggaaaagttttcccgtaacatttacggcaccaccaaagggcagcttcgacaggctattctgtggcaggatctcgatcgcgtgctggcggaaatgggcccgcaaaaactgcgtgtgctggatgctggcggtggagaagggcagaccgcaatcaaaatggccgagcgtgggcatcaggtcattttatgcgatctttctgcgcagatgatcgaccgcgcaaaacaggcggcagaagcaaaaggtgtgagcgacaacatgcaatttatacattgcgccgctcaggatgttgcttcgcatttggaaacgcccgttgatctgatattgttccatgcggtgctcgagtgggtggccgatccccgcagtgtattgcagaccctgtggtcagtgttgcgtccaggcggcgtgttgtcgttaatgttctacaatgcgcatggtttgttgatgcataacatggtcgccgggaattttgattacgtgcaggcgggaatgccgaaaaagaaaaaacggacgctttcgccagattatccacgcgacccggcgcaggtttatctgtggctggaagaagctggttggcaaattatgggtaagacaggcgttcgcgtgtttcatgattatctgcgcgagaagcaccagcagcgcgactgctatgaagcattacttgaattagaaacgcgttattgccgtcaggaaccgtatattaccctggggcgttatattcatgtcaccgcgcgcaaaccgcagagcaaggataaagtatgagtgaattttcccagacagtccccgaactggttgcctgggccagaaaaaatgacttctccatctcgctgccggtagaccgactctcttttctgctggcggttgccacgctgaacggcgagcgtctggatggtgagatgagtgaaggcgagctggtggatgcattccgccatgtgagtgatgcgtttgagcaaaccagcgaaaccatcggcgtgcgcgccaataacgcgatcaacgacatggtgcgtcaacgtctgctgaaccgctttaccagcgagcaggcggaagggaacgcaatttaccgtctgacgccgctcggcatcggcattactgactactacatccgtcagcgcgagttttctacgctgcgtctttctatgcagttgtcgattgtggcgggtgagctcaaacgcgcagcagatgccgccgaagagggcggtgatgaatttcactggcaccgtaatgtctatgcgccactgaaatattcggtagcagaaattttcgacagtatcgacctgacgcaacgtctgatggacgaacagcagcagcaggtgaaggacgatatcgcccagttgctgaacaaagactggcgggcggcgatttccagctgtgaattgttgctttcggaaacttccggaacgctgcgtgaattgcaggatacgctggaagcggcaggcgacaaattgcaggctaatctgttgcgcattcaggatgcgacgatgacccatgacgatctgcatttcgtcgatcgtctggtgttcgatctgcagagcaaactcgatcgtattatcagttggggccagcaatccatcgacttgtggattggctacgaccgccacgtacacaaatttattcgtaccgcgatcgatatggataaaaaccgcgtctttgctcagcggttacgtcagtcggtacaaacctattttgatgagccgtgggcgctaacttatgccaatgccgatcgtctgctggatatgcgtgacgaagagatggcactgcgcgatgaagaagtgactggggaacttcctgaggatctggaatacgaagagtttaacgagatccgcgaacagctggcggcgatcatcgaagaacaacttgccgtgtacaaaaccagacaagtgccgctggatcttggtctggtggtacgcgaatatctgtcacagtatccgcgtgcacgtcactttgacgttgcgcgcattgttattgatcaggcggtacgtcttggcgtagcgcaagcagatttcaccggactgccagcgaaatggcagccgattaatgattacggagccaaggtacaggcgcatgtcatcgacaaatattgaacaagtgatgccggttaagctggcgcaggcgctggcgaatccgttatttccggcgctggacagcgccttacgttcaggccgccatattggcctcgacgaactggataatcatgcattcctgatggattttcaggaatatctggaagagttttacgcgcgttataacgttgagcttattcgcgcaccggaagggttcttctatttacgcccacgttccaccactcttatcccgcgttccgtcttgtcggaactggatatgatggtcgggaaaatcctctgttatctctatctcagcccggaacggctggcgaatgaggggattttcacccagcaggaactgtacgacgaactgctcaccctggccgatgaagcaaaactgctgaaactggtgaacaaccgttcaaccggttcagacgttgaccgtcagaagttgcaggagaaagtacgttcttcgctcaaccgtctgcgtcgtttaggcatggtgtggtttatgggccacgacagcagcaagtttcgcattaccgaatcggtgttccgcttcggagccgatgtgcgtgctggcgacgatccccgtgaagcacagcgtcgcctgattcgtgatggcgaagcaatgccgattgaaaatcatctgcaactcaacgatgaaaccgaagagaatcagccagatagcggagaggaagaataatgattgaacgcggtaaatttcgctcactgacgctgattaactggaacggcttttttgcccgaacttttgaccttgacgagctggtcacgacgctttctggcggtaacggggcgggtaaatccaccaccatggcggcgttcgttacggcgctgatccccgacctgaccctgctgcatttccgtaacactacggaagccggggccaccagcggttcgcgcgataaaggtctgcacggtaagctgaaagcgggtgtctgttattcgatgctcgacaccattaactcgcgccaccagcgcgtggtggtcggtgtgcgtctgcaacaggttgccggacgcgatcgtaaagtggatatcaagccgtttgccattcagggactgccgatgtcggtgcagccgacacagctggtgaccgaaaccctgaacgaacgccaggcgcgcgtgctgccgcttaacgagctgaaagacaagctcgaggcgatggaaggcgtgcagtttaaacagttcaactccattactgattaccactcgctgatgttcgatctgggcatcatcgcgcgtcgtctgcgctccgcatctgaccgtagcaaattctatcgtctgatcgaagcttcgctgtatggcgggatctccagtgccattacccgttctctgcgcgactacctgttgccagaaaacagcggcgtgcgtaaagcgttccaggacatggaagcggcgctgcgtgaaaaccgtatgacgctggaagcgattcgtgtcacccagtcggaccgcgacctgtttaagcatctgatcagcgaagccaccaactacgtggcggcggactacatgcgtcacgccaacgagcgccgtgtccatctcgacaaagccctggagtttcgtcgcgagctacatacttcgcgtcagcaactggcggctgagcagtacaaacacgtcgatatggcgcgtgagctggcagagcacaacggtgccgaaggcgatctggaagcggattatcaggcggccagtgatcacctgaacctggtgcaaaccgcactgcgtcagcaggagaagatcgaacgctacgaagcggatctcgatgagctgcagatccgtctggaagagcaaaatgaagtggtggcagaagccatcgaacgccaggaagagaatgaggctcgtgcggaagctgccgaactggaagtggacgagctgaaaagccagcttgctgactaccagcaggcgctggacgtccagcaaacgcgcgcgatccagtataaccaggcgattgctgcgcttaatcgtgccaaagaactgtgccatctgccggacttaaccgccgactgcgccgccgaatggctggaaaccttccaggcgaaagagctggaagcgactgaaaaaatgctctctcttgagcagaaaatgagcatggcgcaaaccgcgcacagccagtttgagcaggcttatcagctggtggtggcaatcaacggcccgctggcgcgtaacgaggcgtgggatgtcgctcgcgaactattgcgcgaaggggtcgatcagcgtcacctggcagagcaggttcaaccgttgcggatgcgcttaagtgaactggaacagcgtctgcgcgagcagcaagaagccgaacgcctgctggcagacttctgcaaacgtcagggcaagaattttgatattgatgaactggaagctctgcatcaggagctggaagcgcgcattgcctctctttccgatagcgtgtctaacgcccgtgaagagcgcatggcactgcgccaggaacaggaacagctgcagtctcgcattcagagtttgatgcagcgtgcgccggtttggctggcagcgcaaaacagtctcaaccagttgagcgagcagtgcggtgaagagtttacctccagccaggacgtcaccgaatatctgcaacagttgctggagcgtgagcgagaggcgattgttgaacgcgatgaagtgggcgcgcgcaaaaacgctgtcgatgaagagatcgaacgtttaagccagcctggcggctctgaagatcagcgtctgaacgcgctggcggagcgttttggcggcgtgctgctgtcagaaatttatgacgacgttagcctggaagatgcgccgtacttctcagcgctgtatggcccgtcacgccacgccatcgtggtgccagatctgtcacaggtaactgaacacctggaaggcttgaccgattgcccggaagatctctatttgatcgaaggggatccgcagtcattcgatgacagcgtgttcagcgttgatgagctggaaaaagcggtagtggtgaaaatcgccgatcgtcagtggcgttattcacgtttcccggaagtgccgctgtttggtcgtgctgcgcgtgaaagccgtattgaaagcctccatgccgagcgtgaagtgctttccgaacgcttcgccacgctctcctttgatgtacagaaaactcagcgtctgcatcaggcgttcagccgctttatcggcagtcatctggcggttgcgtttgagtctgacccggaagcagaaatccgtcaactgaacagccgtcgcgtcgaactggagcgggcgttgagtaatcatgaaaatgataaccagcagcagcgtattcagtttgagcaggcgaaagaaggcgttacggcgctgaaccgcattctgccgcgtctcaacctgttggctgatgacagcctggcggatcgcgtcgatgaaatccgcgaacgtctggatgaagcccaggaagccgcgcgttttgttcagcagtttggcaatcaactggcgaaactggaaccgatcgtttcggtattgcagagcgacccggaacagttcgaacagctaaaagaagattacgcgtactctcagcagatgcagcgcgatgcccgtcagcaggcgtttgccctgacggaagtggtgcagcgtcgtgcgcactttagctattctgactcggcagaaatgctgagcggtaatagcgatctcaacgaaaagctgcgtgaacgtctggaacaggcggaagcggagcgtactcgcgctcgtgaagcgttgcgtggtcacgcagcgcagttgagtcagtacaaccaggtgctggcttcgctgaaaagttcttacgacaccaaaaaagagctactcaacgatctgcaacgtgaattgcaggatatcggcgtgcgcgccgatagcggggcagaagagcgggcgcgaattcgccgtgacgagctgcatgcgcaactgagtaataaccggtcccgccgcaaccagctggaaaaagcactgactttctgcgaagcggagatggacaatctgacccgcaaactgcgcaagctggagcgggattactttgagatgcgcgagcaggtagtgaccgccaaagcgggctggtgtgcagtgatgcgcatggtgaaagataacggcgttgaacggcgcttacaccgtcgcgagctggcttatctctccgctgatgatttgcgctctatgtcggataaggcattgggtgcgctgcgtctggcggtggcggataacgaacatctgcgcgacgtgctgcgcatgtcggaagatccaaaacgtccggaacgtaaaattcagttcttcgtggcggtttatcagcatctgcgtgaacgtattcgtcaggatattattcgtaccgatgatccggtggaagccatcgagcagatggaaatcgaacttagccgactgaccgaggagttaacctcccgcgaacagaaactggcgatcagttcccgcagcgtggcgaacatcattcgcaaaaccattcagcgcgagcagaaccgtatccgtatgctcaaccaggggttgcagaacgtatcgtttggtcaggtgaacagcgtacgtctgaacgtgaacgtgcgtgaaacgcacgccatgctgctggatgtgctctctgaacagcacgagcagcatcaggatctgtttaacagcaaccgtctgaccttctcggaagcgctggcgaaattgtatcagcgtcttaatccgcagattgatatggggcagcgcgcgccgcagaccattggcgaagaactgctggattaccgcaactatctggaaatggaagttgaggttaaccgtggttccgatggctggttgcgcgcagagtctggtgcattgtcgaccggtgaggcgattggtaccggtatgtcgattctggtgatggtggtacaaagctgggaagatgaatctcgccgcctgcgcggtaaagatatctctccttgccgcctgctgttcctcgatgaagcagcgcgactggatgctcgttctatcgccacgctgtttgaattgtgtgaacgtttgcaaatgcagctcatcatcgcagcgccggaaaatatcagcccggagaaaggcaccacctataaactggtgcgtaaagtcttccagaataccgaacacgttcacgtcgtcggcctgcgaggatttgcgccgcaactccctgaaacgcttccaggaagtgacgaagcgccttctcaggcgagttaaaattaaggcggcagcaatgccgccttttctttttccgaaaactccgtttccgcactaaaaaagtggcacattacggcgcgcttttctttaaacttctttacattaggttatgtaaaaacgtatcggcgtttatatactgaagataagcctgatgagtaacaggcttgctcgtcatactttcgtgagtattggcgttgtacaggcaagtcgtaaaataacagcctggctattcagagtatgataaaaacagggggcaagggatgttgcttaatatgatgtgtggtcgtcggctgtcggcaatcagtttgtgcctggccgtaacattcgctccactgttcaatgcgcaggccgatgagcctgaagtaatccctggcgacagcccggtggctgtcagtgaacagggcgaggcactgccgcaggcgcaagccacggcaataatggcggggatccagccattgcctgaaggtgcggcagaaaaagcccgcacgcaaatcgaatctcaattacccgcaggttacaagccggtttatcttaaccagcttcaactgttgtatgccgcacgcgatatgcaacccatgtgggaaaaccgtgatgctgttaaagccttccagcaacagctggcagaggtggcgattgccggtttccagccgcagtttaataaatgggtagagttactgaccgatcctggtgttaacgggatggcacgcgacgtagtgctctctgatgcgatgatgggctatctccatttcattgcaaatattccggtcaaaggcactcgctggctatatagcagtaaaccttatgcacttgcaacgccgccgctctcggtgattaaccaatggcagctggcgctggataaaggtcaattgcctacgtttgttgcaggactggcaccgcagcatccgcaatatgcggcgatgcatgaatcgttactggccttactcagtgacaccaaaccgtggccccaactgaccggcaaagcaacgttgcgcccagggcagtggagtaacgacgtaccggcgttgcgcgaaatattgcaacgcacaggcatgttggacggggggccgaaaattactctacctggcgatgacacgccaactgacgcggtagtcagcccatccgctgttactgttgaaacagcagaaactaagccgatggacaagcaaacgacgtctcgtagtaaacctgcgcctgccgttcgtgccgcctacgataatgaactggtggaagccgttaaacgttttcaggcatggcaaggattgggggcagatggtgctattggcccggcaacacgtgactggttaaacgtaacgcccgcccagcgtgctggcgtgttggctctcaacatccagcgattgcgcttgctgccaacagagctttctaccgggatcatggttaacattccggcctattcgctggtctactatcagaacggcaatcaggtgctggattcgcgagtcattgtcggtcgccccgatcgcaaaacgccgatgatgagcagtgcccttaacaacgtagtggtaaacccgccgtggaacgtacctccaactctggcacgcaaagatattctgccaaaagtgcgcaacgatccgggatatctcgaaagccatggctatacggtgatgcgcggctggaacagcagagaagcgattgatccatggcaggttgactggtctacaatcacggcctcgaatttaccgttccgcttccagcaggctccaggcccacggaactcgctggggcgctataaattcaatatgccgagttcagaggccatttatttgcatgacacgccgaaccacaatctgttcaagcgtgatacacgcgcattgagctcaggctgtgtacgagtgaataaagcttccgatctggcgaatatgctgttgcaggatgcaggctggaatgacaaacgtatttctgatgcgctgaagcagggtgatacacgttacgtcaatattcggcagtcgattccggtgaatctctactacctgacggcctttgttggtgcagatggtcgtacccagtatcgtacagatatttacaattatgatctgcctgcgcgatccagctcgcaaatcgtatcgaaagcggaacaattaatcaggtaaatgaagtagttcggggaaatcagttgtcgtaataattagcatgattgggggcgattctctgcagcccccgtcactgctggggttgagtcatcttgacgtctgctttacgggcggttaaggtgcctcttgtgcgccagaagtgcatataaacgataacattgacctgtagacttgattatcatggacaaattcgacgctaatcgccgcaaattgctggcgcttggtggcgttgcactcggtgccgccatcctgccgacccctgcgtttgcaacactctctaccccacgcccgcgcattttgacactcaataatcttcataccggagagtcaatcaaagcggagtttttcgatggcagaggctatattcaggaagaattggcaaaacttaaccattttttccgcgattaccgcgcgaacaaaataaagtccatcgacccaggattattcgaccagttgtatcgcctgcaagggttgttaggcacgcgcaaaccggtgcaactcatttccggttatcgttccattgataccaacaatgaactacgcgcccgcagccgtggagtagcgaagaaaagctatcacactaaaggccaggcgatggatttccatattgaaggtatcgcgttaagcaatattcgcaaagccgcgttatctatgcgcgcaggtggtgtaggatattacccacgtagtaactttgtgcatattgataccgggccagcacggcactggtagtaattgcttaacgaaacaggggcagtatgaactatcgtattattccggtcaccgcattctcccagaactgttcattgatctggtgtgaacaaacccgcctggccgcactggtcgatcctggcggcgatgcggaaaaatcaaacaggaagttgatgacagcggcctgacactgatgcagatcctgctgacgcatggtcatctggaccacgttggtgcagcggcggaactggcgcaacattacggcgtgccggtttttggtccggaaaaagaagatgagttctggctgcaaggcttgcctgcgcaaagtcgtatgtttggtctggaagagtgccagccgctgacgccagatcgttggctgaacgaaggcgataccatcagcatagggaatgtgactttacaggtgttacattgccctgggcatacgccgggtcatgtcgtgttttttgatgatcgggcaaagctgctgatttctggcgatgttattttcaaaggcggagtagggcgcagtgacttcccgcgtggcgatcataatcaactgatttcttcaatcaaagataaattgctgccactgggggatgacgtgacatttattccgggtcacggaccattatccacacttggttatgaacgcctgcataatcccttcctgcaagacgaaatgcccgtctggtaaggcacataaaaaagcccgcttttaatgcgggcctggatttctgacaaagtgcgctttgtttatgccggatgcggcacgagcgccttatccggcctacaaaatcgtgcaaattcaaaatattgcaggggacgcgtagatactgttatggcctgcaagttttttcctggtccggtttcccggattgcaggcatgccagacacagcgccgtcaggcgctgttttttcatcccttccgcgatttttacgccgctaccggattatgccgtgacgcatcgaacggcacgcctgacttcagcactccatacgccacctgtgccagcttgcgcatcatcgcgccgagaatcacctttcctttcttgccattagccgccagacggtcgcggaacgcccgtccccactcagtcttactggtggctaccattgcgggcatatacaacgccctgcgaagcgacacatgtccggccttactcatccggctcgcccctctcacactgctacctgattcataacgccgtggtgtcagacccgcaaaagcggcgaactgtctggcatgggcgaagcggtccttcagaccgatataagccagcaataccgcagatgttttctctccgatacccgggatgctttccagcagtttcctgcggtgtttcatatccggatcatcgtctgtcaggtcttttatctgcttctcaagacgcttcagctctgcttcaagccacagaaggtgagcatcaatgctcggtctctggacttcccgcgccgtttcagtgcgattcagttcctgcgtgtgcatatctgtcagcgcctggtggcggactaccagggcacgcaacgcgcgttcaagcgggtgaggcgcttcccaggctgcagggcgcttctgacgacagaactctgccagcatgcgcgcatccacggtatcagtcttgttacgcagtccttcactctgagcgaaagctttacccagcgcaggattaatgactgacactatgtagccagcatcgtaaaggcactcagcgacaggttccatataggtgccggtcgcttcgatgcagatatgcgcatggtcaatcttgtgacctttcagccagctcaccagctcatcgtgccctttagtggtgttagcgaattttttggtgcgatgacgaccatcaggacgcaacacatcgacatccagtttctctttagcggtgtcgataccgatataatgaagttcatgttccatagtgaaaccaaccttgcaaatacggattaccgggaaaccggtccatgatactgtccggtttatcactttgggagaaaggcagtccgctgcataaatctacgcaacaggttagaacccaaggcccgatacggcatgcggactgcaggcagagaaaactggccgattttctctgcactggagggataatacaaggcctgataagcgtagcgcatcaggcaatgttgcgtttgtcatcagtctcagcccgcttttcagcgggcttcattgtttttaatgcttacagcactgccacaatcgcttcgcacagcggagccatgttatctggtgtcatcccggccacatttacgcgaccagaagcaaccgcatatacgccaaactcttcgcgcagacgcagcacttgttcttttgtcaggccactgaaggagaacatgccgttctgtttgatgataaagctgaagtcgcggtttgcgcctttttcctgcagcgtattgacgaacaactgacgcatacgctgaatacgctggcgcatatcagtcagctcttgttcccaaatcgcacgtaacgcatcgttgctcaggatggtggcaacaacagaagcgccgtgtgctggtgggttagagtagttagcgcgaatcgccgctttcatttggctgaatgcgcgatcaacggtttcactgtcggcagcaaccagagtacaagcgccaacacgctcgttgtacaggccaaagtttttagagtaggaactggcaacaatcagctctttatgcatagccgcgaaagcgcgcagtccttcagcatcttcttccagaccacgggcaaaaccctggtaagcgaagtcaaacagcggtaaccagcctttctcaactgagagttgtgccagtgtctgccattgttccagcgtagggtcgataccggttgggttatggcagcagccatggaacagcactacgtcgccagcctgagcttcgttcaggctgttaatcagtgcatcgaagtcaagagtgtgattttccgcatcataataagcgtattcacgaacttccagacctgcagagttaaagacgctcttatggttcggccagcttgggttgctcacccacactcgcttaacgctggtattttttgccaggaaatcggcagctacgcgtagtgcgccagtgccccccggagtctgtgccgtgcgagcacgtttgtcattgatcagggcgctacctttaccaaacagcagttcctgagtgcagcgaccaaattcagggatgccgtcaatgccgaggtaatttttggtggtttcattttcgagcagatactgttcagcctttttcacgctggtcagtaccggggttttgcccgtctcatctttatagacaccaatcccgaggttaattttgccgggacgttcatcggcacgaaacagatcggccaggcccagaatcgggtcggcaggagcggcggtaatgttctcaaacatgacgaggttccattatggttacagaagggaagtccgctatcagggtaacgggagatttacaaaattccaactattactgatgaaaacgcaggctgtttttgcaagacgtgagattgctctggaaggtataaaaaaaacaggaccaaagtcctgttttttcggcatttaacaaagaggtgtgctattagaactggtaaacgatacccacagcaacggtgtcgtctgaacctacgcccagtttgttgtcagaatcgatctggttgatgatgtagtcaacataggtggacatgtttttgttgaagtagtaggttgcgcccacttcaaagtagttcaccagatcaacatcaccgataccttctacgtctttcgctttagatttggtgtaagcgatggacggacgcagaccgaaatcgaactggtattgcgcaactaacagaacgtcttgcgttttgttggcgaagccgctggtgtttgtaaatttattagtgatcggcgtagcgttacgggtttcaccgtagttcgctgccaggtagatgttgttcgcgtcgtacttcagaccagtagcccactgttcagcttttttaccgttgccaagaggttgagcttcttgcaggttggtacggtcagctgcaccataagcaccaacgataccaaagccttcgtattcgtagctgatagaaccgccaacaccgtcgccgttagaacggcgtgcagtgtcacgctcgtttttacccaggtactgaacagcgaagttcaggccatcaaccagaccaaagaagttggagttacgataggtagcaacgccgccaacacgaccaacgaagaagtcatcgctgtatgcagtatcaccaccaaattctggcagcatatcggtgtaacccagtgcatcataaaccacaccgtagttacggccgtaatcgaaagaaccaacgtcagcgtatttaagacccgcgaatgccagacgcgttttgttaccagtttgagcgtcagcgccttcagagttgttaccctggaagttatattcccactgaccataaccggtcagatcggaattgatttgagtttcccctttaaaaccaagacgggcataggtcatgtcgccattgccaccgtaactgttttcaccgttacccttggaaaaataatgcagaccaacagctttaccgtacagatctactttgttgccatctttgttatagatttctgcagcgtttgcagtacctgctactaacagagcagggacgatcactgccagaatattgcgcttcatcattatttattaccctcatggtttttttatgacacctgccactgccgtcaataagttctgtcaataaaaatttacggaactattgatgagagtttggtgtctttatgtgtctgcaggcatctttccattcaaactaacgtttcgctaccgtgaaagtgctacaaagataaagatttagtttcaaaaagaaaaaatatgtaaccaaaagtaaaaattaaggaactttgtgaacaccgtcatatttccatagaaacgtgatgatatttacagcaatttttatctatttatatgatttacttatatttaaattaactaaacggaaattttgtttctgatggaaactttatcgacctggcacaaaatcctctttcagacatccagaatgccaaaaaatagtatgaaaattgtgctatcagctaagaaaaaactaatccgcaataagaatgcggtttattttttgtgcgtaaatgttgcaatgtaatattccgtaacaggatgatcgttatggcggggttgcaaatagattgcttgacttaacaaacagataacttgacagaaaggataaaaaagagccagcaggcgctggctctttgaggaagaaaatcagaagctggcgttgcgcggagtacgtgggaacggaatcacatcacgcacgttttgcacgccagttacgtaagcaatcaggcgttcaaaaccaagaccgaaacctgaatgcggaacagtaccgtagcgacgcagatcgcgataccaccagtaatcttctttattcaggcccatttccagcatacgctcgtccagaacgtccagacgttcttcacgctgggagccaccaatgatctcaccgatgcccggagccagaacgtccatagccgcaacggttttaccgtcttcgttgaggcgcatatagaacgctttaatatctttcggatagtttttaaccactaccggtgctttaaagtgttcttccgccagataacgctcatgctcagaagagagatcgacgccccagtaaaccgggttttcaaacttcctgccgcagttttcgagaatggtcactgcgtcggtgtaatccacctgcgcgaaatcggcctcaatgaagcgttccagacgtgaaacggcatctttatctacgcgttcagcgaagaatttcatgtcgtctgcgcgttcttcgagaaccgctttgaagacatatttcagcatggcttcagccagacccgcgatatcgttcaggttagcaaacgccacttccggctccagcatccagaattccgccaggtgacggctggtgttggagttttcagcacggaaagtcgggccgaaggtataaattttggataatgcgcaagcgtaggtttcgccgttcaactggccagatacggtcaggaaagactctttaccaaagaagtctttgtcgaaatccactttgccctgatcgttacgcggcaggttttccagatccagcgtagaaacgcggaacatttcgcctgcaccttcggtatcagatgcggtaatcagtggcgttgaaacccagaagaatccctgctcgttaaagaagcgatgcagcgcctgcgccagcgtatggcgaacgcgcgcgacggcaccaatcaggtttgtgcgcggacgcaggtgagcgacttcacgcagatactcaatgctgtggcgttttgccgccatcgggtaagtgtctggatcttcaacccaaccagcaacttcaactttgctggcctgaatttcaaattgttgcccctggcccggcgacgccacgactttacccgtcacaatgaccgagcagccggtggtcagacgcaggacgtcttcattgtaattgggcagagaattattgatgacagcctgtacaggatcaaagcaggaaccgtcataaacggcgaggaaggagatgccagcttttgaatctcggcgggtacgtaccmatccgcgtacggtgacttcgctgtcaacggctacgcggccctggagtacgtcggctacaggcacaacgctcataatattctctctgttaatagtcggaaaaaataaacacttgtccacccgtaaatgggggatacctatgttacctggcatctgcaatcagacaagcagaattcgcaaatgcagcgaaagatttcggaattaaaggtaaaaaaagggagccgattagctccctgatgatattaactggcttttttaatatgcggaaggtcgaacgctttgcgcagcgcccgaacaaacgctttatcgtggcagatagttttgccagggctgtcagaaagtttcgccaccggtttaccgttacactctaccaacttaatcacaatattcaggggttttacctgggggatatcgcaggttaggcgagtcccaataccaaaacttaattgcacgcgggaagagaagtggcggtatagctcaaccgctttgcgtaaatccagattgtcagagaaaaccagcgttttactctgtggatcaattcccagcttttcataatgtgcaatggctttttcaccccattcaaccgggtcgccagagtcatgacgcaggccctgataccgactagcgaactcgacaccgaaatcacgcaggaaagcatccatagtgatgcagtcggttaatgcaatgccaagttggtcgggatactcttccagccaggcagcaagtgcagctcgctggctgttggctagatccgggctgatttgctgatgtgcctggaaccattcgtgtgcctgtgttcccatcggcgtgagggaaagccgacgcgccagatcgtagttgctggtgcccacgaaccaggattcctgttgcagacgcttaacgatggtttcttgtacttcgcgagaaaaacggcgacgggtgccaaaatccatcagatggaagcgcgacatatcaagaccggcggttaacgccgagaagtcgactaatttgctttccagcgtgtcgagggcttgcgcaacgtcggcctgcggtgagcgatagcgatgtaccatttcactgataaccgccagcaaaggaacttcccagaggatgacttcacgccacggaccgcttaagcgaatatccagcttgccattatcgttggacacggtgacttgttccgggttaaagcggaactcgcgtaaccagttaagatagtcggccttaaagaaaggcagggcagagagccactgatattcatcatcctgcaggcgcaggtgctgcatcgcctgaatctgttcacgaatagcatcggcataaatacccagcagatcgtcacctcggcaacgaaactccgccgcgacatgcacatcgtaatagtgatgaaacacggcttgctgcatatgcaacttataagcatctgtatccagcaacgagtgcagaacaggagaagcgaattgtgtcataggtgcgcagtagcgtcctcgtacaggagcgtttagtacaataaacatcttcaggaactgctggagtataccttgtttcgcaatttattgaaccccgatcacaccatatgccacctttctggtcgatggcattacgcggtgtatgttataaaaatgtagcaataaaggcgtttgtacctgaaaagatgaagattctgcatagcgcgatttacgcaacaggaatagactgaacaccagactctataaaagatgctaaaggttatttatgactcaacagccacaagccaaataccgtcacgattatcgtgcgccggattaccagattactgatattgacttgacctttgacctcgacgcgcaaaagacggtcgttaccgcggtcagccaggctgtccgtcatggtgcatcagatgctccgcttcgtctcaacggcgaagacctcaaactggtttctgttcatattaatgatgagccgtggaccgcctggaaagaagaagagggcgcactggtcatcagtaatttgccggagcgttttacgcttaagatcattaatgaaataagcccggcggcgaatacggcgctggaagggctttatcagtcaggcgatgcgctttgcacccagtgtgaagccgaaggtttccgccatattacgtattatctcgaccgcccggacgtgctggcgcgttttaccaccaaaattattgccgataaaaccaaatatcccttcctgctttccaacggtaaccgcgttgcgcaaggtgaactggaaaacggacgccattgggtacagtggcaggacccgttcccgaaaccgtgctacctgtttgcgctggtggcaggcgactttgatgtactgcgcgacacctttaccacgcgttctggtcgcgaagtggcgctggagctgtacgtcgatcgcggcaaccttgatcgcgcgccgtgggcgatgacctcgctgaaaaactcaatgaaatgggatgaagaacgcttcggcctggagtatgacctcgacatctatatgatcgtcgcggtggatttcttcaatatgggcgcaatggagaataagggtttgaatatctttaactccaaatatgtgctggcccgcaccgacaccgccactgacaaagattacctcgatattgaacgcgttatcggccatgaatatttccataactggaccggtaaccgagtcacctgccgcgactggttccagctcagcctgaaagaaggtttaaccgtcttccgcgatcaggaattcagctctgaccttggttcccgcgcggtaaaccgtatcaataatgtgcgcaccatgcgcggattgcagtttgcggaagacgccagcccgatggcgcacccgatccgcccggatatggtcattgagatgaacaacttctacaccctgaccgtttacgagaagggcgcggaagtgattcgcatgatccacaccctgctgggcgaagaaaacttccagaaagggatgcaactctatttcgagcgccatgatggcagcgcggcaacctgcgacgactttgtgcaggcgatggaagatgcgtcgaatgtcgatctctcccatttccgccgttggtacagccagtccggcacgccgattgtgaccgtcaaagacgactacaatccggaaaccgagcagtacaccctgaccatcagccagcgcacgccagccacgccggatcaggcagaaaaacagccgctgcatattccatttgccatcgaattgtatgacaacgaaggcaaagtgatcccgttgcagaaaggcggtcatccggtgaattccgtgctgaacgtcacccaggcggaacagacctttgtttttgataatgtctacttccagccggtgcctgcgctgctgtgcgaattctctgcgccagtgaaactggaatataagtggagcgatcagcaactgaccttcctgatgcgtcatgcgcgtaatgatttctcccgttgggatgcggcgcaaagtttgctggcaacctacatcaagctgaacgtcgcccgtcatcagcaagggcagccgctgtctctgccggtacatgtggctgacgctttccgcgcggtgctgctcgatgagaagattgatccggcgctggcggcagaaatcctgacgctgccttctgtcaatgaaatggctgaactgttcgatatcatcgacccgattgctattgccgaagtacgcgaagcactcactcgtactctggcgactgaactggcggatgagctgctggctatttacaacgcgaattaccagagcgagtaccgtgttgagcatgaagatattgcaaaacgcactctgcgtaatgcctgcctgcgcttccttgcttttggtgaaacgcatctggctgacgtgctggtgagcaagcaataccatgaagcaaacaatatgaccgatgcgctggcagcgctttctgcggcggttgctgcacagctgccttgccgtgacgcgctgatgcaggagtacgacgataagtggcatcaggacggtctggtgatggataaatggtttatcctgcaagccaccagcccggcggcgaatgtgctggagacggtgcgtggtctgttgcagcatcgctcatttaccatgagcaacccgaaccgtattcgttcgttgattggtgcgtttgcgggcagcaacccggcagcgttccatgccgaagatggcagcggttaccagttcctggtggaaatgcttaccgacctcaacagccgtaacccgcaggtagcttcacgtctgattgaaccgctgattcgcctgaaacgttatgatgccaaacgtcaggagaaaatgcgcgcggcgctggaacagttgaaagggctggaaaatctctctggcgatctgtacgagaagatcaccaaagcactggcttgatacttttgagccaaaatgcctgatgcgacgcttgacgcgtcttatcaggcctacaactccgttgaaattgctggttttgtaggctggataaggcgttcacgccgcattcggcagccgtgcccaactgcctgatgcgatgcttgacgtgtcttatcaggcctactagtccgttgaaaatgctggttttgtgcgccacatccggcatattaaccatgacgccgaatcagttgttcagaatgcccacgccgcattacccgttgcaatacttccgcttccagctccgctaatcgcaccgacctaatcgacgcggacgggggatatccactgtcaaatccagaccaatttttccctcttcaattaacaacacccggtcagccattgctaccgcttcgctcacatcatgcgtcaccaacagtacggtaaagccgtgctgctgccaaagtgacacaatcaaatcctgcatctcgagtcgcgttaaggcgtccagcgccccgagcggttcatcaagcaacaataaacccggtcgatgaatcaacgctcttgccagcgccacacgctgtttctgcccgccagaaagtgcggcaggccattccccggcgcgattctccagtcctactgcagccaacgcccgacgcgcggcatcgcgccactggcctttaaggcctaacccaacgttatcaatcaccgatttccacggcagcagacgcgcatcctgaaacatcattcgcgtgtcttcctgaatctcagccagcggtgtggtgcccgctaacacatcgcctgcggttggcgtttccagacctgccagcaggcgcagcagggtacttttgccaccaccgctgcggcccaccaccgccacaaactgacctgccggaatatgtaaatccagttggttcaggacgatattttccgcgtaatgtttgcttactgcattgagcaacaatggtgtgccctggttcagacgagcagtattcataccgtggcctccttcaaatgataagccgggttccagcgcaaccagaggcgctctaacagctgcgcgctgacgtcagcaagtttgccgagcagggcgtaaagaataatagcgactaccaccacgtccgtttgcaaaaactcccgcgcattcatcgccagataaccaatgcctgaattggcagaaatggtttcggcaacaatcagcgtcagccacatcaggcccaacgcaaaacgcacgccgaccataattgagggcagggcaccaggcaggatcacatggataaacagcggtatgccggataatccatagctacgcgccatttccaccagaccgcgatcgatattacggatgccatgccaggtgttgatataaatggggaatagcgtgccgagcgccaccagaaagatttttgcggattcatcaatgccaaaccacaaaatcaccagcgggatcagcgccagatgcggtacgttgcgcaacatctgaattgaggtatccagcagccgttctccccagcgagatagcccgctaatcagtcccaaaatcaaccccagcgatccgccaattgaaaagccaatcagcgcccgccaggaactgatcgccagatgctgccacagttcgccgctggcggagagcgtccagaacgccgtcaccaccccttccggtgagggcaaaatacgcgtcgacagccagccaactgaggaggccagttgccacaccgccacgatgcccaccggtaaaaaccagggggcaacgcgcaataaccacttcttcactggcgttgccattatttcttccttagctttgcgcgactttacgggggataaaatcattcgccaccgcttcgccttgcggattcagcggctgcggctggggaatttccggaatggcgacatccagatgtgggaacagcaactcgccgacccgatacgcttcttccagatgcggatagcccgaaagcacaaagctgtcgatgccaagcgcggcgtattcgttgattcgcgcagcgaccgtaggaccatcgcccaccagcgccgttccggcaccgccgcgcactaagccaacgcccgcccataaattggggctgatctccagattgtcgcgcttgccgttatgtaacgccgccattcgctgttgtcctacggaatccgtccgggcgaatgcggcctgtgctttggcgatagtttcatcatcaagatgcgagattaaccgctcggcggcctgccacgcttcgtcgttagtttcacgaacaatcacatgcagacgaataccgaaacgaattttgcgtccatgcgcggcagctttcgcccgcacttgttcgatcttctcttttactagttctggcggttcgccccaggtgaggtagagatcaacttgttctgccgccagctcctgggcgacgtctgacgatccgccaaagtaaagcggaggataaggctgttgaatcggcgggaagagcagttttgctccgcgcacatgaatatgtttaccgttgaaattgacggtttcccccagcaataagcgccgccagacctgggtaaattccgccgaggcttcgtagcgctcgctatgatcaaggaacacgccgtcgcctgccagctcttgtggatcgctgcctgtgaccagattaaacaacgcacgaccatttgagagacggtcaagcgtggcggcctggcgagcggcaacggtaggtgaggttacgctggggcgcagggcgacaagaaacttcagccgctgcgtcaccgggatcatcgacgccgccaccagccacgcatcttcacacgatcgccccgttgggatcagcacaccggtatagcccagacgatccgccgcttgcgcaatttgttgcagataaccgtgatcaaccgggcgtgaaccttcttccgttcccagatagtgcccgtcaccgtgggtcggtaaaaaccagaacatattcagactcataattgttttccttccagttgagtgggctgccagatgcgctggcgaatatcgacttttttcggcaccagacgattttcataaaacagatctgccgtttgctgctgtaaggcggcaatctcggcgttaaccggtttgatggtggtaggagggcgatgatctaagtaagaggcaatcaccggtgccggtaagcccatcgtttttgccagtaaagcgatgctttgctcgcgctggctgcgggttaacgcatcggcctcactaaaggttgccagtacgccctgaataaaagcgccgtttttttctgcataggggcgagctgccagataaaacgatccggtttgattgagatcggtgccgtctttcaacacccgcacgccgccctgtaataacgcagcggagtagtagggatcccagatagcccaggcgtcaacgttaccttgctggaacgcggcgcgggcatcggcaggtgtcaggtaagtgggttgtatatcggtaaacttaagtccggcctgacgcagtgcacgcagtaaaaggttgtgtgaactggaacctttctgaaaggcaactttgtgacctttaagatcggctacggttttgatcgggctgttttctgccaccagaatcacttcggctttgggcttcggtggctcgacgcccacatataccaaatcagccccggcagcctgggcaaagattggcggaatatccccggtactgccgagatcaatactgccaacgtttaacgcttccaacatttgcggacccgcggggaactccacccaggagatttttgattgcggatagcgtttttccagtaactggtggctttttgccagcaccataccaatactgcctttctgatagcctatacgtaacgcttcaggcgaggattctgcagcaaccgcaaaagtagagacgctaagcaatcccgccagcgccagtttaatgatgttacgcatggacattacctcgcagagacagaaggtcaggaacctgaacatcgcggcggtgcaatgcctgccagaaagtttctagcgcggtatcaagacgggtttgcagatttggcgtgaactggggtctgtgatggtaatcaatgacttgtgagtcatcggcaaacacgccgtgcaggatctcctgggctttcagtgcgcttaaaactggtttaagggcataatcgaccgccagcagatgggccacggtaccgcccgtcgccagcggtagcaccactttgccttgcaaagcgcgctctggcagcaggtcgagcagggttttcagcgcgccggaataggcggctttatacacaggtgtagcgactatcagtccatcagcctgttgcagctgttcggtgaaggtcttgagtgccggactatcgaaacgagcataaagcagatcttccggggcgaagttttgcagattccagtgataaacctctacatcgaggccatttagtttttcccgcgcatattccagcaaggagctggagcgagaaggaaagcgaggactacccgccagggtgatgacacgcatactctctccttataaccaattgttctttttttgttaacattgagaacaattcggtcagtctgtcggagagacaagaaaatgccaaatataaattttgtgtatctttttctgaaaataaactaaagaaagggctttatatatcacgcatatttatttgttggatagtcattagatgttgaatcaatgaattactcgttcagttaatatttaaatattcatgaaatctataaattaaagatttgtcacttattggatttagtatgcttgatttaaatggcggtcaattattgttattattaagtctaatgtcatttaaaggcattatcatatttacgaagagatcaggatgatgacgatgaaaaaaagtgtattgacggcgtttataactgtggtatgtgcaacgtccagcgttatggcagctgatgataatgctatcacggatggcaaagtaacatttaatggtaaagttattgctccagcttgtaccctggtagctgcgacgaaagattcagtagtcacattgccaaatgtcagcgccaccaagttgcaaactaatggagcagtctctggcgttaaaactgatgtaccaattgccttagaaggctgtgatgttactgtaactaaaaatgcgacgtttacctttagtggtacggctgacggcgtgcaacctacagcatttgccaaccaggctaccaccgatgcagcgacgaatgttgctctacaaatgtatctgccagatggttctacatcggtaactcccggtaccgaaacgtcgaatattcagttagcggattctgctgagcaaacagtgacctttaaagttgattatatcgctacggggaaagcgacttctggtaatgtgaatgcggtaacaaatttccatattaactattattaatagaactcattaattgttttattaattagtacccctctagtgttctggaggggatattcatattttttaagagtgactatttatgaaaacttgcataacaaagggaattgtgaccgtaagtttaacggcaatattactcagctgctcatccgcatgggcggcaggtaaaggcgggattggacttgcagcaacacgtcttgtttattcagaaggtgaagagcaaatttcactgggtgtacgtaacaccagtccggatgttccttatcttattcagtcatgggtgatgaccccagataataaaaaatcagcagattttattattacaccaccgctatttgtgctgaatccggctaatgagaatctgttacgcattatgtacattggtgcgccgttggcgaaagacagagaaacccttttcttcactagcgtacgggcagtcccttcaacaacgaagcgggaagagggaaataccctgaagattgccacacaaagcgtcatcaaacttttctggcgaccaaaaggtttagcgtatcccttaggcgaggctccggcgaaactgcgttgcacttcgtcagctgacatggttacggtcagtaacccaacaccttatttcattaccctgacagacctgaaaataggtggaaaagtagttaaaaatcaaatgatttccccctttgataaataccaattttctctgccaaagggggccaaaaatagcagcgtaacgtatcgaaccatcaatgactacggggcggaaacgccgcaactcaactgtaaatcgtaagccgtcttcagttaagagagcgagatgtatagaactcatcgacaacacagcctgttaagctctggtggagtgccatcgtttattggtgggctggtggtgtttgtgtcggcagcgttcaatgcacaagctgaaacctggttcgatcctgcttttttcaaagatgatccctcaatggtggccgatttgtctcgtttcgaaaaaggacaaaaaataacgccaggggtttatcgtgtcgatattgttctgaatcagacaattgtagatacgcgcaacgtcaattttgttgagataacgccagagaaggggattgccgcctgtttgacgactgaaagcctggatgcaatgggtgttaatactgatgcgtttccggcttttaaacaactggacaaacaagcgtgtgtgccattggcggagattattccggatgccagcgtaacgtttaatgtgaataaactccgtctggaaatttcagtaccgcaaatcgccatcaaaagtaatgcccgtggttatgtcccccctgaacgttgggatgaagggatcaacgcgctattactgggatattcgtttagcggggctaacagtattcatagcagcgcagacagtgattctggcgacagctattttctgaatttaaacagtggcgttaatttaggcccatggagattgcgcaacaattcaacatggagtcgcagtagtggccaaaccgcagaatggaagaatctcagcagctatttgcagcgggcggttattccactaaaaggcgaactgaccgtaggtgatgattatactgcaggcgatttttcgatagtgtcagctttcgtggtgtgcagctggcgtcagatgacaacatgctgccagacagcctgaaagggtttgcgcctgtggtgcgtggtatcgccaaaagcaatgcccagataacgattaagcaaaatggttacaccatttaccaaacttatgtatcgcctggtgcttttgaaattagtgatctctattccacgtcgtcgagcggtgatttgttagttgaaatcaaagaagcggacggcagcgtcaatagctacagcgtaccgttttccagcgtgccattactccagcgtcaggggcgaatcaaatacgcggtgacactggcgaaatacagaaccaatagtaatgaacagcaggagagcaaatttgcccaggccacgttgcagtggggcggaccgtggggaacgacatggtatggtggtggacaatatgctgaatattaccgtgccgccatgtttggtctgggatttaaccttggcgatttcggagcaatttcgttcgatgcgacccaggcgaagagtacgctggcagaccaaagcgaacataaaggtcagtcatatcgttttctgtatgccaaaacgctcaaccaattgggcactaattttcaattgatgggctatcgctattcgacgtcgggtttctacaccctttccgacaccatgtataaacatatggatggctacgaatttaatgacggtgatgatgaagatacgccgatgtggtcgcgttattacaatttgttttacaccaaacgtggcaaactgcaggtcaatatctcccagcaattaggcgagtacggttcgttttatttaagtggtagccagcaaacttactggcataccgatcaacaggatcggctattacagtttggctacaacacgcaaattaaagatctctcgctgggggtttcctggaactacagtaagtcccgtggtcaacctgatgctgatcaggtgtttgcactaaatttttccctgccgctcaatctgttgctccccagaagtaatgatagctataccaggaaaaaaaattacgcctggatgacctctaacaccagtatcgataacgaagggcacattacacaaaacctgggtttaacggagacactactcgatgacggtaacctgagctacagcgtgcaacagggatataacagcgaggggaaaacggctaatggtagcgccagcatggactacaaaggggcgtttgcagatgcccgagtgggctacaactacagcgataacggcagtcaacaacaactgaactacgctctttcaggcagtttagttgcccattcacagggcattaccctggggcaatcgctgggggaaactaacgtgctgattgcagcaccaggcgcagagaatactcgtgtggcgaacagcaccgggctgaaaactgactggcgcggatataccgttgtcccctatgccacttcttatcgggaaaatcgaatagcacttgatgcggcatcgttaaaacgtaacgtggatcttgaaaatgcagtagtcaacgtggttcccaccaaaggggcgttggttctggcggagttcaatgcccatgcgggagcaagggtattaatgaaaacatcaaagcagggtataccgctgcgttttggcgcgatagcgacgctggacggcatacagactaatagcggcattattgatgatgatggctcgctctatatgtccggtttgcccgctcagggagcgataactgtacgctggggcgaagctcccgatcaaatttgtcatatcagttaccagcttaccgaacaacaaattaactctgcgattacgcgaatggatgccatatgcagataatctttggagaaaaatgcgtgttattactacgactattttttgccgccgtcttaatgctatggtgcgctcaaactgctgcttatagcgggcagtgtcataccactcaggggaatccgtatattggcgtcaattttggcgttaaaaccctggaggaagaagaaaatacggctggagtagttaaagacaaattttatcagtggaacgaatcgaatgattattatgtttcctgtgattgcgataaagacaatgtcagaagtggccgatgggcattcgccgcggattcaccgttagtctatttaggcgacaactggtacaaaattaatgactatcttgccgccaaagttttattgcaggttaaaggcagttctcctactgcggttcctttcgaaaacgtgggcacaggggcagatacacgatggcatatttgcgatcccggcggtcaacgtttaggtggccagggggctagcggtaatagcggtagcttttccctgaaaatattgcagccgttcgttggttcggtcgtcattcctcctatggcgctggcgcgattatttgaatgctacaacatacccgcaggtgattcctgcacgactacaggtacaccggttttagtgtattacctgtctggtacgatcaattcacttggctcatgttccgtcaatgccggagagactatcgaggtcgatctgggcgacgtatttgcggctaactttcgtgttgtagggcataaaccccttggggccagaacggcagaactcgcaattccagtcaggtgtaacacgggaaacgaagggttagttaacgtcaacctgagtctgacggcaacctcagaccccagctatccccaggcgattaagacgtcacgtcctggcgtgggcgtggtggtgaccgatagccagaacaacattatttcccctgctggtgggacactaccgctctctattcctgatgatgcagacagtatcgcgcgaatgaatgtctatccagtcagcacgacaggcgtaccaccagaaaccgggcgatttgaagccacggcaacggtgagaataaattttgattaacgcgtgaacgtatgaagaaaaaaacgatatttcagtgcgttatcttgttctttagcattcttaacatccatgtcgggatggctgggcctgaacaagttagtatgcatatttatgggaatgtggtcgatcagggctgtgatgtcgccaccaaaagtgcattacaaaatattcatattggtgattttaatatcagtgattttcaggccgcgaataccgtaagcactgctgctgatttgaatatcgatatcaccggttgtgccgctggtattactggcgcggacgtcctttttagcggcgaggctgacacccttgcgccgacactgctcaaactaactgacacaggcggaagcggtggtatggcaacggggattgccgtgcaaattcttgatgcgcaaagtcagcaagaaatcccgctcaatcaggtccagcctcttacgcccttaaaagccggggataacacactcaaatatcaacttcgttataagtccacaaaggcgggagcaacgggcggtaatgcgacggcggttctctattttgatctggtttaccagtgaaggagtgatgttgaaacggataatctggattctgttcttactgggattaacggggggctgtgagctatttgcccatgatggcacagtcaacattagcggatcgtttcgccgtaatacatgcgtgctggcacaggatagcaagcaaatcaatgtgcagttaggcgatgtctcgctgacacgtttttttcatgggaattatggcccggagaaatctttcatcattaatttgcaggattgcggaacagatgtcagcacggttgacgtcaccttttcaggaacccccgacggagtgcagagcgaaatgctgtccattgaaagtggtacggatgcagccagcgggctggcaattgcgattctggatgatgcgaagatattgattccgcttaaccaggcgagtaaagactacagcctacatagcggtaaggtgccattaactttttatgcgcaattgcgacctgtcaatagcgatgtgcagtcgggtaaagtgaatgccagcgcgacatttgtacttcattatgactaatacgtggaacagattggcgctcttgattttcgccgttttatcgctgctggtggcgggtgaattgcgggcaggagtggtggtcggcggaacgcgatttatctttccggcagacagagaatcgatatctattttactgactaataccagtcaggaatcctggcttattaacagtaaaatcaaccgcccaacgcgttgggccgggggggaagcgtcgacagtgccagcaccattactggccgctccgccacttattctcctgaagcccggtactacaggcacgttgcgcttgctgagaacggaaagcgacatcttgcctgtggatcgcgaaacgctatttgagttaagcattgccagcgtgccatccggcaaagttgaaaatcagagcgtaaaagtggcgatgcgctcggtatttaaactgttctggcgacccgaaggtttgccgggcgaccctctggaagcttatcaacaattacgctggacacggaattcgcagggtgtacaactcactaacccaacgccttactacattaacctgattcagttgagcgtaaatggtaaagcgttaagtaatgcgggagttgtgccgcctaaaagccagcgtcagacaagctggtgtcaggcaatcgcaccgtgtcatgtcgcctggcgggcgataaatgattacggcgggttgagtgcaaagaaggagcaaaatctgccctgaaacaggttcggaaaacgtttgcgtttttttgccgcaggtcaattcccttttggtccgaactcgcacataatacgcccccggtttgcacaccgggaatccaggagagttcatgtactaccccttcgttcgtaaagcccttttccagctcgatccagagcgcgctcatgagtttacttttcagcaattacgccgtattacaggaacgccgtttgaagcactggtgcggcagaaagtgcctgcgaaacctgttaactgcatgggcctgacgtttaaaaatccgcttggtctggcagccggtcttgataaagacggggagtgcattgacgcgttaggcgcgatgggatttggatcgatcgagatcggtaccgtcacgccacgtccacagccaggtaatgacaagccgcgtctctttcgtctggtagatgccgaaggtttgatcaaccgtatgggctttaataatcttggcgttgataacctcgtagagaacgtaaaaaaggcccattatgacggcgtcctgggtattaacatcggcaaaaataaagatacgccagtggagcagggcaaagatgactatctgatttgtatggaaaaaatctatgcctatgcgggatatatcgccatcaatatttcatcgccgaataccccaggattacgcacactgcaatatggtgaagcgctggatgatctcttaaccgcgattaaaaataagcaaaatgatttgcaagcgatgcaccataaatatgtgccgatcgcagtgaagatcgcgccggatctttctgaagaagaattgatccaggttgccgatagtttagttcgccataatattgatggcgttattgcaaccaataccacactcgatcgttctcttgttcagggaatgaaaaattgcgatcaaaccggtggcttaagtggtcgtccgcttcagttaaaaagcaccgaaattattcgccgcttgtcactggaattaaacggtcgcttaccgatcatcggtgttggcggcatcgactcggttatcgctgcgcgtgaaaagattgctgcgggtgcctcactggtgcaaatttattctggttttatttttaaaggtccgccgctgattaaagaaatcgttacccatatctaattatttcttcgaattcctctttataagataatcagggctttattttcagccctggttgttttatattcattgctgttgcttatttagacattttgtacttttattgttgaggttattaagcgaagcgacaatggattgtgttgctgcggttttatagggtaggggagaggcagatgcgaattaaaccagacgataactggcgttggtattacgatgaagagcacgatcgaatgatgctcgatttagccaatggtatgctatttcgctcacgttttgcgcgcaagatgttgactccagatgccttttctcccgcaggcttttgcgttgacgacgccgcgctctatttctcttttgaagaaaagtgccgcgattttaatttatctaaagaacaaaaagccgaactggtgctgaatgcactggtagcaattcgctatctcaaaccgcaaatgccgaaaagctggcattttgtttcccatggtgaaatgtgggtgcccatgccgggcgatgcggcctgcgtttggttgagcgatactcacgagcaggtcaatttgctggtcgttgaatctggcgaaaatgccgcactatgcctgctggcacaaccctgcgttgttattgcgggtcgcgcgatgcagttgggcgacgccattaaaatcatgaacgacaggctgaaaccgcaggttaatgttgacagcttcagcctcgaacaggctgtctaacgcgccaacttaagtgcagtcttcggtacacagctacagcaaagaatggtgccatcatcgcccattgctgattttttcagcggcgtgacttcgccttctaaaagctgaacacggcaacttccacaaatgcccgcgcggcaagaataagggatacgaattccctgattttctaattgctccagcaacacctgttggttatttccacgaaatgcctgtccctgccagtcaatatctacatttgcgtccggttgttgcgtgatgttggcggtatcatcagcggcagctgcgccgtaaatttttgccggagccgttgccagaatttccacctcatcgccaacgcgaatcacgccgctattacgggcaattaaattctgaccaaaatcgacatcgccgttatcctgggcagtgcggaaagattgcaatgtttttaatggttcgcctgccggatgtttttgccctttttctgggctgacggtggtgaaaatacagcggctacaaggtttaaccacatcaaacaccacatcaccaatgcgaatcactttccagcgatcttcttcccaggctgacgcgccggaaaccaccagattggggcggaattgctccatttttacactggccggacaacgttgttggagatcacgtaacgaggcttcgttagcaagaaggtaaggatagccatcagcaaatgacagaggtacagtgttgtggcgtttcacgcgccgggtcatttgtggccccacccagcgtaattgcacttcgcgggagaaaaatccacttagccatttgttgatcgcgtctggcgcaattcgcgcggtaaaatgtgtgccccaaacttcggttggtgcgtcttgtgtggcgaaatcagcaaaacgaacatatgcgctactgccatctggtgcggtgagatgcaagccatcatgcacaggtgaaggagtaaaccgtaccatctggggaaactggcgagcggtaataaacgtaccgtcaggttccgtgatcataaagatgcgatcgaaggccagaccactgacatcagccagagcatgtgtaagaccaatgccgcgcatcgatttaacaggatgaataaaaagccgggttaatgtcaccacggtgcggtcctcaaatgaaaataagccctcaactttatgacatgacgcgcttattagctataatgcgcaacaattttcttagcgcctgtcccattaggctattttatttgtcagtttggccctgggttgtgctcgaaatcctcacgtacttgtgtacgctccggtttctccgcgctgtccatgtccagactgactgcaacaattacgcctactgcggtaggctcttagagtaaaagtgacgatatgaattctctgtttgccagtacggcccgtgggctggaagagctgttaaaaactgaactggaaaacctgggggccgttgaatgccaggtggttcagggtggggtccatttcaagggcgacacacggcttgtttaccagagcctgatgtggagccgcctggcctcgcgtattatgttgccgctgggcgagtgtaaggtttacagcgatttagacctctatctcggtgttcaggcgatcaactggacagagatgtttaatcctggcgcgaccttcgctgtccacttcagtggtttgaatgacaccatccgcaacagtcagtacggcgcgatgaaagtgaaagacgcgatcgtcgatgctttcacgcggaaaaatctgccgcgtccaaatgttgatcgcgatgcgccggatatccgcgttaacgtctggctgcataaagaaaccgccagtatcgctcttgatctgagtggtgatggtttacatctgcgtggctatcgcgatcgtgctggtattgcgccgatcaaagaaaccctggcagccgctattgtgatgcgatccggctggcagccaggaacaccgctgctcgatccgatgtgtggttccggtacgttgctgattgaagcggcgatgctggcgaccgatcgcgcaccaggcttgcaccgtgggcgttggggctttagcggctgggcgcagcatgatgaagctatctggcaggaagtgaaagcggaagcgcaaactcgcgcccgtaaaggcctggctgagtatagctctcatttttacggttcggacagcgacgcacgggtgattcaacgtgcacgcactaacgcccgtcttgcggggattggtgaactgatcacctttgaggtgaaagatgtcgcgcaactgaccaatccgctgccgaaagggccgtacggcacagtgttgagcaacccgccatacggggaacgtctggacagcgaaccggcgctgattgcgctgcatagcctgctgggtcggatcatgaaaaaccagtttggtggctggaatctctctttgtttagtgcctcgccggatctgctaagctgcttgcagctgcgtgcagacaaacagtacaaggcgaaaaacggcccgctggactgcgtacagaaaaattaccacgttgccgaaagcactccagacagcaaaccggcgatggtagcggaagactacgccaaccgcctgcgtaagaacctcaaaaaattcgagaagtgggctcgccaggaaggaattgaatgttaccgcctgtatgacgccgatctaccggaatataacgttgccgttgaccgttatgccgactgggtggtggtgcaggagtatgcgccgccaaaaactattgatgctcacaaagcgcgtcagcgtctgttcgatattatcgctgcaaccatttcggtactggggattgcgccaaacaaactggtgctgaaaacccgtgaacgccagaagggcaaaaatcagtaccagaaactgggcgagaagggcgagtttcttgaagttaccgaatataacgctcacttgttggtgaacctgacggattacctcgataccggtctgtttctcgatcaccgtatcgcccgtcgtatgctcggtcagatgagcaaaggcaaagatttcctcaacctgttctcttataccggcagcgccaccgtgcatgcgggattaggcggtgcacgcagcaccaccaccgtggatatgtcgcgtacttatctggagtgggcagaacgcaacctgcgtttgaatggcctgaccgggcgtgcgcatcgcctgattcaggccgattgcctggcgtggctgcgtgaggcaaatgaacagttcgatctgatctttatcgatccgccaaccttctctaactcaaaacgaatggaagatgcgtttgatgttcagcgcgatcatctggcgctgatgaaagatttgaaacgtctgctgcgtgcaggtgggacgattatgttctcgaacaataaacgtggcttccgtatggatctcgacggcctagcaaaactgggactgaaagcacaagaaattacgcaaaaaacgctctcccaggatttcgcccgtaaccgccagatccacaactgctggctgattaccgcagcctaaaggaatagtaatgtcattaatcagtatgcatggcgcatggctgtcgttcagcgacgcgccgcttctcgataacgcagaactgcatatcgaagataacgaacgtgtttgtctggtgggccgcaacggcgcgggcaaatcgacgttaatgaaaatcctcaaccgtgaacaagggctggatgacggtcgcattatttacgagcaagatttgattgtagctcgtctgcaacaggatccgccgcgtaacgttgagggtagcgtttatgatttcgttgccgaaggcattgaagaacaagcggaatatctgaaacgctatcacgatatttcgcgcctggtgatgaacgacccgagcgagaaaaatctcaacgaactggcgaaggttcaggaacagctggatcaccacaacctgtggcagctggaaaaccgcatcaacgaagtgctggcgcaactggggttagatcctaacgttgcgctgtcgtcgctttccggcggctggttgcgtaaagcggcattaggacgcgcgctggtgagtaatccgcgcgtgctgttgcttgatgaaccgacaaaccacctggatattgaaaccatcgactggctggaagggtttttgaaaactttcaacgggacgattattttcatctcccacgaccgttcgtttatccgcaatatggcgacgcgcattgttgatctcgatcgcggcaagctggtgacctatccagggaattacgaccagtacctgctggaaaaagaagaagccctgcgcgtggaagaattacaaaatgccgagttcgatcgcaaattggcgcaggaagaggtgtggatccgccaggggatcaaagcacgccgtacccgtaatgaaggccgcgtacgcgccctgaaagcgatgcgtcgcgagcgtggtgaacgtcgcgaagtgatgggtaccgcaaagatgcaggtggaagaggccagccgctccggtaagatcgttttcgaaatggaagacgtttgctaccaggttgacggtaagcaactggtgaaagatttttcggcccaggttctacgtggcgacaaaattgccctgattggtccgaatgggtgcggcaaaaccacgctgctgaaactgatgctcggtcagcttcaagcggacagcgggcgtattcacgttggcaccaaactggaagtggcttatttcgatcagcaccgcgcggaactggatcccgataaaacggtgatggataaccttgccgaaggtaagcaagaggtgatggttaacggcaagccacgccacgtattgggctatttgcaggactttctgttccatccgaaacgggcgatgacgccggtacgtgcgctttctggcggtgagcggaaccgcttgctgctggcgcgtttgttcctcaaaccaagcaacttattgattcttgacgaaccgaccaacgatcttgatgtcgaaacgctggaactgctggaagaactgatcgacagctatcagggcacggtattgctggttagccacgatcgtcagtttgtcgataacaccgttacagaatgttggatcttcgaaggcggcggtaaaattggtcgttatgtcggcggttatcatgatgcccgtggtcagcaagagcagtatgtggcgctcaaacagcctgcggtgaaaaaaaccgaagaagccgccgcggcaaaagcagaaactgtaaaacgcagcagtagcaaactaagctataaattgcagcgcgaactggagcagctaccgcaattgctcgaagatctggaggcgaagctggaagccctacagacgcaggtggcggatgcttccttcttcagtcagccacatgagcagacacaaaaagtgctcgccgatatggctgctgcagagcaggagctggagcaagcctttgaacgctgggagtatcttgaagcgttaaaaaatggtggctgatcgcaaaatagtcgatttaaacagagacagctgacaacggtaaaattgcctgatgaactgggtttatcaggcatgaaaaccaacactttgttagtcatctgtaaaatagcgcatcattaaggagtaccaatgtgcgaacatcatcatgccgcgaagcacatcctgtgctcgcagtgtgacatgctggtggcgttaccgcgccttgagcatggtcagaaagcggcatgtccccggtgtggcacaacgttaaccgtggcgtgggatgcccctcggcagcgtcccaccgcctatgcgttggctgcactgttcatgctgttgctgtccaacttgtttccttttgtgaatatgaacgttgcaggagttaccagtgaaattacattactggaaattcccggcgtgcttttttctgaggactacgccagcctcggcacctttttcctgttgtttgtgcaactggttcccgcgttttgtctgataaccattctgttactggtgaatcgcgcggaattaccggtccgtttaaaagagcaactggcacgggtgctttttcaactcaaaacctggggaatggcggagattttcctcgctggtgtgctggtcagtttcgttaaactgatggcttacggcagcattggggtaggcagcagctttctcccctggtgtttattttgtgtcctgcaactgcgcgcttttcagtgcgttgatcgtcgctggttatgggacgacatcgccccgatgccagaactgcgccagccgctaaaaccaggcgtcacggggatacgtcaggggctgcgttcgtgctcctgttgtacggcaatccttcctgctgatgaacccgtgtgcccgcgttgtagtaccaaagggtacgttcggcgtagaaacagcctgcagtggacactcgcgctgcttgtaacgtccatcatgctgtatcttccggctaatattttgcccatcatggtgacggatttattaggctcgaagatgccgtcgacgattctcgctggggtcattctgttatggagcgaaggctcttatcccgtcgctgcggtgatctttctggccagtattatggtgccaacgttaaagatgatcgccatcgcgtggctgtgttgggatgccaaagggcatggcaagcgcgacagtgaaagaatgcatttgatttatgaagttgttgagtttgtaggccgctggtcgatgattgacgttttcgttatcgcggtgctctcggcgctggtgcgtatgggaggtttaatgagtatttatccggcaatgggtgcattaatgtttgctttagtcgtcataatgacaatgttttctgctatgacgtttgacccgcgtttgtcgtgggatcgtcaacctgaatcagagcatgaggagtcctgacagtatggaatctaataatggggaagccaaaatccagaaagtgaagaactggtctcccgtgtggatatttcctatcgtcacggcgctcattggggcctgggttcttttttatcattacagccatcagggaccggaagtgaccctgatcaccgcgaatgcggaaggaattgaaggtggcaaaaccaccattaaaagccgtagcgttgacgtcggcgtggttgaaagcgccacactggctgatgatttgacgcacgttgaaatcaaagcgcggctgaattccggtatggaaaaattgctgcataaagacaccgtcttttgggtggtgaaaccgcagattggtcgcgaagggattagcggcctgggaacgctgctgtctggagtttatatcgaactgcagccaggcgcgaaaggcagcaaaatggataaatacgatttgctggactcgccaccgttggccccgcctgatgcgaaaggtatccgtgtgattctcgatagcaaaaaagccgggcagctctcgccaggagatccggtgctgttccgtggctatcgggtaggttcggttgaaaccagcaccttcgatacacaaaaacgcaatatcagctatcaactgttcatcaatgcaccttatgaccgactggtgaccaacaatgttcgcttctggaaagatagtggcattgcggttgatctgacgtcagcagggatgcgtgtggagatgggctcattgacaacgctgctgagtggcggtgtcagctttgatgtgccggaaggtctggatttagggcagccagtggcaccgaaaacagctttcgttttgtatgatgatcagaagagcattcaggattcgttgtacaccgatcacattgattatctgatgttctttaaagattcggtacgcggtctgcaaccgggagctccggtagagttccggggtattcgcctgggtaccgtaagcaaagtgccattctttgcgccgaatatgcgtcagacatttaacgatgattaccgtattccggtactgattcgtatcgagccagagcggctgaaaatgcagcttggcgaaaatgcggatgttgttgagcaccttggcgaattgttgaaacgtggtttacgcggatcgctgaaaaccggaaacctggtcactggtgcactgtatgttgatctcgatttctatccaaatacgcctgcaataaccggtattcgtgaatttaatggttatcagattatcccgaccgttagcggcggcctggcgcaaatccagcaacgactgatggaagcgttggataagatcaacaaactgccattgaatccgatgattgaacaggcaaccagtacgctttctgaaagtcagcgcacaatgaaaaacctgcaaacgacgctggatagcatgaacaagatcctcgctagccagtcgatgcagcagttgccgacggatatgcagtcaacgttgcgtgaattgaatcgcagcatgcagggcttccagcctggctccgcagcctacaacaagatggtggcggatatgcagcgccttgatcaggtgttgcgagaactgcaaccggtgctgaaaacgctcaatgagaagagtaacgcgctggtatttgaagcgaaggacaaaaaagatccagagccgaagagggcgaaacaatgaaaaagtggctagtgacgattgcagcactgtggctggccggatgcagctccggcgaaattaataaaaactattaccagttacctgtggtgcagagcggtacacaaagtaccgccagccagggcaatcgtctgttatgggtagagcaggtcactgttcctgactatctggcggggaatggtgtggtttatcaaaccagtgatgtgaagtatgtgattgccaacaacaacttgtgggccagcccgttggatcaacagttgcgcaacaccctggttgccaacctgagtacgcaactgcccggctgggtggttgcctcccagcctctgggaagcgcccaggacacgctcaatgttaccgtaacggagtttaacggtcgctatgatggcaaggtcattgtcagtggtgagtggctgttgaaccaccagggacaactgatcaaacgtccgttccgtctggaaggagtgcaaactcaggatggttacgatgagatggttaaagtactggccagtgtctggagtcaggaagccgcttctattgcgcaagagataaagcgtctaccttaattataaagatttgtaaatataaccgtctccggtatgttgcctgaggcggtttttttgtttctaacgtgcggaaaaatttgttcctcttcacattttttgtacaaccgacatgcccgtgtagctcacaaatatgacagtggcgtgaattttgcgcattgacggcagttatgattcgcggtattgcttaactgtgattgcacatttagtaatcactgttttcttttccaccagaaaccagtatgagggaaacgaggcatgaagagacaaaaacgagatcgcctggaacgggcacatcaacgtggttatcaggccggcatcgccggacgctcaaaagaaatgtgtccctatcagacgctgaatcaaaggtcacaatggctgggaggctggcgagaagccatggcggacagggtagtaatggcctgattctgtctctttaaaaagaaacctccgcattgcggaggtttcgccttttgatactctgtctgattataatcagaaggcagacgtatcctggaacagaccgactttcaggtcgctggcggtatagataagacgaccatcaaccagcacttcgccatccgccaggcccataatcagacgacggttaacaatgcgtttaaagtgaatacggtaggtcacttttttcgctgtcggcagtacctgaccagtgaatttcacttcgccaacgcccagcgcgcggcctttaccttcgctgcccagccagccgaggtagaaccctaccagctgccacattgcgtccaggcccaggcatcccggcataaccggatcgccaataaagtggcatccgaagaaccacagatccggattgatatccagttctgcttcaacataccctttgtcgaagttaccacccgtttcggtcattttgaccacacggtccatcatcagcatgttcggtgctggcaattgcgggcctttagcgccaaacagttcaccgcgaccagaggcaagaaggtcttcttttgtataggattcgcgtttatctaccatgttctctgtaagccttattttattgaagcacgcaggatagctaacacgtgtacgctgaacaagtccgatcagttcggaataaaccagttcagccaacgtaatggccatggaaaacggtgacgtccttcctgttgcgatgcttgcgcgatacgttcctggatggtttgcatcagcgtcgtttggccttcgccatcccacaccagatttaataataacggcagtgcgtcagtcacatcgtctactgcccagatggtgaatttgccttcttctaccgctttcaccagttcactgtgaagacttaaatggcgaacgttagctgtggggataatgacaccttgtttcccggttaactcacgttgctggcaaatagcaaagaagccttcgattttctcatttaaaccaccgaccggctgggcgcgaccgaactgatcgactgaacctgtgatagcgatactctgattcaccggcacatcggcgagggcgcttatcagggcgcagagttcagccatcgaggcactatctccatcaacttcactgtatgactgctcaaatgtcagcgatgctgagaaggggatctgttgctcaagctgtagttccgacatcaggaacgcttgcatgatcatcatccctttcgcatggatattgccgccaagctccgctttgcgttcgatgtcggtgaattcaccatcgccaatatgcacaacgcagctaatgcgagaaggttcgccaaaagcgcgtggatgacccggaaattcaatgaccgaaagggcgttaatttgcccgatgcgttcgccttcggtttcaatcaggatttgctcctgaaggatctcatcctgcatacgttcagcgaggaaaccttcgcgccattcacgctgctgcagcattaagtttagctgctcgccggagaaggtgtcgccatcacacagggaggcgacctctttacactggcggaggatccactgcgggctaagcggaagtgtttcttgttcaccggtgtagcgtgctgcttcgcggataagtaccggccaggcatccgctcccggtgcaggtaagtgattatgtctggcggtaaatgtcacccagcgacaccactgggttactgactctgcatcgacaatctgcagagtatcttcaaattcgctataaatagcctgctctgaaagctctggctccatctcctggaaatcagccaatgattcgcgttcgcctaccagaatgactttcagcttcaatggcatcgaaggcacagagacggggagagggcgcgactcatcaaacgcaacccagtcaaaacgctcgcggttaacgatatttttcagccgcatccacagcagaggttgcgccagcagtgtacgcaaagagatgatgagaataccgccatttgcctgatgcaccagaccaggctgcagggtaatgtcgccattaaactggcgcaggcagccaaagagttgctccgcttctacccagtcggcagcgacaacttgcgttaaagtcgcaaaattatcatctgcactcactgcgtgacgtaagcggatggagtggccggaaacctcatagtgaccgcccaccagttggcctgcatcgctttgtagcgtacgcgcggcattggcaataagattcagatactcagactcttccggggccttcgccagcataaaagaggaggatgctcgcgtatgcagcaactgctccagtgcgaattgcagtcgcggttgagtatcactgaataaaggatcgttttcgtcaatcaaatgtggctgagcaaatatttcctgatagctatcggtatcaggaaccaggtcacgccatgcaagtttcgtaatggtcaaagttgatgttttttagtctgttgtcaaagccgcgattataccgtaaccggcactacagcacacgtagaaagcaccgacaatactcctggcatgggcgttaaagctcacaggatggagattcttttcttcactggcctaaaaagctgatattctgtaaagagttacacggtaacattgagatcgctatgaaatatcaacaacttgaaaatcttgaaagcggttggaaatggaagtatctggtgaagaagcatcgcgaaggggagttaatcacccgttacatagaagccagtgccgcccaggaagccgtcgatgtgttgctctcgctcgaaaatgaacccgtgctggtaaatggctggattgacaagcatatgaatccggaactggtcaatcgcatgaagcaaaccattcgggcaagacgaaagcgccattttaatgcggaacaccagcatacgcgcaaaaaatcgatcgatctggaatttattgtctggcaacgtctggctggtcttgcgcagcgtcgcggtaaaacgctttctgaaacgattgttcagctgattgaagatgcggaaaacaaagagaaatacgcgaataaaatgtcttctctgaagcaggatctgcaggcattgctgggtaaggaataactgacgaaagtcagttcaatttactaaaggcaaaaaaaaccccgcagcagcggggtttttctaccagacgagaacttaagcttgcggctgagttacaacgtctttgatacctttaacttcgatctctacgcgacgatccggagccaggcagtcgatcagtgcagcacgctgtttcacgttgtcacaggtgttgccagtaaccgggttggattcgcccataccacgtgcggagatcttgtctgccgggatacctttggagatcaggtaatcaacaacagactgagcacggcgctcggacagaccctggttgtaagcgtcagaaccgatgcggtcggtgtaacccagaacaactacggaaccgtctttcggatccaggttgctcagctggctgtacagctgatccagagcagcctgaccttccggtttcagggttgctttgttgaagttgaacagaacgtcagacttcagagtgaagtgcttggtctgtacttccggtgccggagctggagccggagcaactactggagctgcttcgccctgaccgaaacggtaggaaacacccaggctcagcatgccgttgtccggacgagtgccgatggtgtgtgcgtcaccgatgttgttggtccactggtattccagacgggtagcgatttcaggagtgatcgcgtactcaacaccgccagcgaagaccggagaaacgccggtgtcgtggtttttaccataaacgttggatttagtgtctgcacgccataccataccacccagacgagtgtagatgtccaggtcgtcagtgattgggtaacccagtttagcggtcagttgaacgccctgagctttgtatgcaccgttttcaacgctgcctttgtacggcatacgacctaaccagtcgtaacccatttcaaagccaacatacgggttaacctggtaaccaccaaaagcaccagcgcccagttggttttcatgggtcgggccattgttgttgatgaaaccagtgtcatggtactgggaccagcccagtttagcaccagtgtaccaggtgttatctttcggagcggcctgcgctacggtagcgaaaccagccagtgccactgcaatcgcgatagctgtctttttcattttttgcgcctcgttatcatccaaaatacgccatgaatatctccaacgagataacacggttaaatccttcaccgggggatctgctcaatattaactctaccgatatcttcggcttatgccgagcacccctggcgatgtaaagtctacaacgtagttgaaaacttacaagtgtgaactccgtcaggcatatgaaaaaaaagtcttgtataaggtatgtttaatcttttttgtcagcgacaatttacagaagagaatcgcggaaaccgcttcagacaagcctccgcaaggaaaattagtcacgactgaaagcattggctgggcgacaaaaaaagttccaggattaatcctaaatttacttaatgatacaaattagagtgaatttttagcccggaaagttgtctcgtggcgtgagaggatgcgcttaccggacgcataataaaccccatagcgttaccttcatttgccgcatcaacaagttcagcatgctcttcttcagtcaaatcatctgccaaccaaccgatcaccacactgtaattgcccgtgcgtaaagcgcgaaccattgactccacagtgtggcaaggggagagctggctaatctgcattactttcgttaagggtagcccagatgcctgaacccattcccgactcagtttttgttgcggtgttaaccagagttgccagcgcgattgctgaccgagttgctgtaacaatggcaacagtagaagttgcgtcatcatgggctgatcttcgcgatagacaacttcactgataagcccggctgtagtgttttccgtagagacacgcgcaattttacttgctgcggatgagaacgacgaagaacgatgtgcatagcctgaagtgtacataatcaatccagcccctgtgagttactgtatggatgtacagtacatccagtgacaacaaagatcaaccctattttcggaaagagcctcgcaaattttgtcgttggtgacgggaaaacataaattaatcttgccccttaagaataagttgcctattttcgtagttaacggatccgttaatgtgaatcattcttttatgttatgattttaaaaggaattttatgaaaagcctctcctataagcggatctataaatcacaagaatacctggcaacgttgggcacaattgaataccgatcattgtttggcagttacagcctgaccgttgacgacacggtgtttgcgatggtttctgatggtgagttgtatcttcgggcttgtgagcaaagtgcacagtactgtgtaaaacatccgcctgtctggctgacatataaaaagtgtggccgatccgttaccctcaattactatcgggttgatgaaagtctatggcgaaatcaactgaagctggtgcgtctgtcgaaatattctctcgatgcagcgctgaaagagaaaagcacgcgcaatacccgggaaagactgaaagatttgcccaatatgtcttttcatctggaagcgattctcggggaggtggggattaaggatgtacgggcgttacgtatacttggggcaaaaatgtgttggttgcgactgcggcagcaaaacagtctggtgacagaaaagattctgtttatgcttgaaggtgccattatcggcattcatgaagctgcgctcccggtggcacgccgccaggagcttgcagaatgggctgactctcttacgccgaaacaggagtttcctgcggaacttgagtaatctggcgttgcagacgaccaatctcaggcagtaatgcaatcaataatccaacttgttgtacgaccagaggttctttgctgtctgcccgtggttcaagttgctgcatccgctgtttcaggctagctaatgcctcattgacgcgttcttcatcagcaggttgatgatgtaacgcgtcatcaacatagcaaactgcgtcatcaagaaacgccagaatttcaggattagttaactgctcccggtgagcaccgagggctgagatatagctggtaaacgtatggttaaggcacagcaaccgaaacgcggcttcgcgaatttgcggggtaacgttcggttcgctggacatatttgataccaccgacgccagttcagcatcacggttgtgtgcatcgcggcgggcaatacgatacgccagacggttatcacgcccctgatggtattgctccagtatggcatcgagataccggcagttggcctctgtggcgcgttcgagcattcgcggcagattgcgaaactgccagtcaggccagatgtagctcactgccgcccacgcaatggcacaaccaatcagcgtatcgattacgcgaggtaacgctacttcaaaaccttcacccagcaagttaaaacacagtagcaccaaaagtgtgatgaacatcgttgcatgggcatattgcacgttacggaaggcaaaaagagcacgccggtaataaccagtagcaccagctgcccttccagtgacggtacaaaccacagcacaggaatgccaatggcgataccgaccagcgtaccaataatccttaacttcaggcggtggcgcgtggcgttatagtttggctggcagacaaacaaacttgtcagcaagatccaatacccgtgatgcattccggttatttgaatgatggcgtagccgaagcacaacaccagcgacattcttaccgcatgacggaagagggcggattccggcgtgaagtgacggctaagacgcagccagatatcactcaacccgtgcgggctgtcatcagcgagctcattttcgtcattattatggggtagtgcctgggcctgttctgattcaattgttgccagttgggcatcaatggcgcgtaaattgttcagcaaaaatcccagtgttttgagtaaatcggcgggtgcgccgttatcgcgcatccgctccagcgcagcatcaatatgcgtaaaagcgcgctcaaaatgcggatcatgttgataaggctgacgcagcaaaatacagcgtgacagttgctggcacgcctggccctgcatcgacatcagccgctgaaaacggaacagcacgtcgctgtggcgaaaatgttcacgcaatgtttgatactgaatatgagaagagctggcacgctcgtgaatatcctgtgcgacaaagtaataatgcagcgtgcgacgcgttccccgttgaccacgatcgccacgtaagcgggtcagcagcgagagtttcgtctgattcaatgtcgccatcagctgaccgttggcgagagccaaatcgtacagcggtgcctggctttcatcttcaatatcaggatcaaacatgcgcgacttgagctcaagataacgcgccagttgttcatagcaacgcgccaggttgtcctgcagcgggcggacggggaacagcagatgaccaataagtgtcaggacgttgtaccagacggcaccggccagcagatacatcggctgctgataccagtgctcatacagtgatgttcccaacatagtgtaaatggcgatcagcaatgcaccgaaggcaattgttgcatagcgttgacccagaccgccgagcaaaatgaagccgctggtagagagcgttaagccaatcgcaaatagccagggccagggaaacagcaattctactgaggccgaggcgataaaaaagcagaacagcgtaatgatgaggttacgcaaacgtcccgccagtcggtcatcgagatcggtcagcgccgctgccaccatccccagcgttagcggaatcgtcagttttacatcacccagccaccacggaaacgctgtggttccacaaagcgcaataaaaatacgcgcgtaatacagccaggcgctgttccaggtatagcgtttgagcaaaggacttagcataaaggccatattagtggattattcaaaacgacgacgtgcattggcttcacgcgcagcttgcgccgtttctaccgataccacgcgacgaccaaccggccatagtgcaatagcggcaattttaaagttcgcaatgccgacaggaatgccaatgattgaaatacattgtgcgatgcccgttgcaatgtgcatcaggcataaccaccagccaaagaaaatcagccagaaaatattcaataccgtaccgccagtattcagcagcacatttttgccagccgggttcagttcatcgacatgaatagcttcattgccataaggcaccagagacagtttagtgatctcccagcaggatcgtgtcagcggtaaggtaaaaatcagcataatactgaccagagtcgccaacagccagcccagagtggtggcaaatccgccaagcacaaagttcagaatgttcaaaacggtacgcataaaacctcgctttactgtggttttcagtaatgggcggcaattgtaacgtttttttgggctggagcacgttttctctgacggttacactgataagaaataatttcgtgtggatctacagagtcatggaactgaaagcgacaacgcttggaaaacgtctggcacagcacccttacgatcgggcggtgatcctcaatgccgggattaaagtctccggcgatcgccacgaataccttattcctttcaatcaattactggcgattcactgtaagcgcggtctggtatggggcgagctggaatttgtactgccggacgaaaaagtggtgcgtctgcacggcaccgaatggggcgagacgcagcgtttttaccatcatcttgatgctcactggcggcggtggagtggcgagatgagcgaaattgcgtctggtgttttacgccagcaactggatttgattgccacgcgcactggagaaaataaatggctgacgcgtgagcaaacctctggcgtgcagcaacaaatccgccaggctttgtcggcgttgccgttgccggttaaccgactggaagaattcgataactgccgtgaggcgtggcgtaaatgtcaggcctggttgaaagatattgaaagcgctcggttgcagcataaccaggcgtataccgaagccatgcttaccgagtatgcggattttttccgccaggtcgagtcttcaccgctgaatccggcgcaggcccgggcagtcgttaatggcgagcattctctgttagtgctggcaggtgcaggaagcggaaaaacgtcggtgctggtggcccgtgcaggctggttgctggcgcgtggtgaagcgtcccctgagcaaattttattgctggcgtttggtcgcaaagccgctgaagagatggacgagcggattcgcgaacggctacataccgaagacattaccgcacgcacgtttcatgcgctggcgctgcatattattcagcagggcagcaaaaaagttccgatagtcagcaaactggaaaatgataccgctgcccgtcatgaactctttattgctgagtggcgcaagcaatgcagcgaaaagaaagcgcaggcgaagggctggcggcaatggctgacggaagaaatgcagtggtcagtgccagaaggtaacttctgggatgatgaaaaattacagcgtcgccttgcctctcgcctcgatcgctgggtaagtctgatgcggatgcacggtggtgcacaggcagaaatgattgccagtgcacccgaagagattcgcgatctgttcagtaaacgtatcaagttgatggccccgttattaaaagcctggaaaggtgcgctgaaggcagaaaacgctgtcgatttttcgggccttattcatcaggcgattgtgattctggagaaaggtcgctttatcagcccgtggaagcatattctggttgatgaatttcaggatatctcgccgcagcgcgcagcgttgttagcggcattacgcaagcaaaacagtcagacgacgttgttcgccgttggtgatgactggcaggcgatttaccgattcagcggtgcgcaaatgtcgctcaccaccgctttccatgaaaactttggtgaaggcgatcgctgtgatttagacacgacttaccgttttaacagtcgtatcggtgaggtggcaaaccggtttattcagcagaacccaggccagctgaaaaagccgctaaacagcttaaccaatggagacaaaaaagccgtcacgttattggatgagagtcaacttgacgctttgctggataagctctctggttatgccaaaccggaagagcgcattctgatcctggcgcgttaccatcacatgaggcctgccagcctggaaaaagcggcaacacgctggccgaagttgcaaatcgactttatgaccattcatgccagcaaagggcaacaggcggattacgtcatcatcgttggcttgcaggagggaagtgatggttttccagctgcggcgcgggagtcgattatggaagaggcgctactgccaccggttgaggatttcccggacgctgaagaacggcggttaatgtacgtggcgctgacccgggcacgccatcgggtatgggcactgtttaacaaagagaatccctctccctttgtggaaatactgaaaaatctggatgtgccggtggcgagaaaaccgtaagaaacaggtggcgtttgccacctgtgcaatattacttcagacggtccgcgagataacgctgataatcggggatcagaatatcgaccgcgtcgttgaaatgcggcgactggataatgaagtctgccgttgccacgttggtggcgaccggaatgttccataccgtcgccagacgcagcaaggctttcacgtcaggatcgtgcggcacggcatttagtgggtcccagaagaaaatcaatacatcaattttcccttctgagatcaatgcgccaacctgctggtcaccccccattgggccactcaacatcgcgttgatgttcatgccggtcgcgcgggaaattaagttaccggtagtgcctgttgcatacagtacgtgttgttccagtaacggttgatgccgttccacccagctcatcagcatttgtttgcagtgatcgtgtgccaccagcgcaatatgtttccgcgcaggtaaagtgcgagtcgtcagttccataatgtacatccgtagttaactttcctacagattactgtaagcacttatcgctgcaagataaagaccgaaaaagcctgcgcacaggcacaaaaatctcaggaagatggttgtttttccgcccattgcaggaaagtatttcgcgtttgtgggtcagccagtttaaaccaatacttcagccgttgttctgtgagcacctgagactgcggtggaatagcatccagctcggaaacacccgaaagcagcgtactgtcatctgccatcatcgtggcaaattgcggtagtgaagcgcgtttcgcggatttgttatagcgttcaacctcgacctcataatcaatcgtttttgccgttgaggtaatggcgagaatatccagctttaccggaattggcgtcgcatcgccatccaacaattcaaggtgcggcgcggcatcaaaatggttagcttcccgctcattctccaggcgaggcaggcgaaaattgacctggttgatgagctgggtattaaaactgaccaccagcggtggggagatatacagccgttcttcactattggaaagatgaatcgtcttctcaacgcgaaacactaactgatgcggtccattatccagttcaatgctgtccgcaccgcgcagcagagagctggaaaccttcttgccgtcgagtaccagaagatcgacatcggttgaaagccgcagcgtggtggcaaaaacggataccggcaaacataatgcaatcaaggtggtcacgatgccggttttcataggtagctcctgtcaaaagaccgcccgaataataatgtgtcaaaatttttctttaatcatacttactaacatatagacatatttcccgcttttgctctcattcattcgtattagctgcatggttggcatgtcggctttgtcgtacactttgttaaacagtctggaggaaataatgaaagaaaccgatattgcaggcattttaacgtccactcacaccattgcgctggtgggggcaagcgacaaacccgatcgtcccagctatcgcgtgatgaaatatctactcgaccaggggtatcacgtcattccggtttcgccaaaagttgccggcaaaacgctgctgggccagcaggggtatggcacgctggcagacgttccggaaaaggtcgatatggtcgatgttttccgtaattcagaagcggcgtggggcgtggcacaggaagctattgccattggcgcgaaaaccctctggatgcaactgggggtgattaatgagcaagcggcagtactggcacgggatgccgggttgaatgtggtgatggatcgctgcccggctattgagatccctcgcctgggcctggccaaataaaaaatccccggaaggcaaaaaccttccggggattcgttcagggatcagttacgcagacgcggggcctggagttgtttgcggatggtctgcgccagctcatccatggatggctgttcaggatgttcatcctgcaattcgctacttagctgggcttcagccaggtaggtatgaaccggtaggccgttatcgtcctccatcaccacgtgataccacggagcggcgcgaagctcgtcattcaccgccagctcatcaggcgacggttcagagagcgaataaaccgggtcgatatccacgaccactccgagataacctaacagggaatggcggacctgctggccgataccgaatttgctggcaatcatagtcacctcccgggaaatctttacctttgatataagggtaaaattccacatttcaagttacatgacgcgacaggcaaaccctttcagatatagcccttccggataggtagcgatcaccggatgatcggctgcctgacggaactgctctataaattgtacatcacggccggcatcaattgcggcatccgcgatgattttctgaaataaatcgctggtcatcagaccggaacaggagaaagtcaggagaataccgccttcattcagcaactgaatcgccagcatgttgatatctttatagccacgacacgcgcccatcaactggcttttattctcaacaaacttcggcgggtccatcacgataacgtcaaatttttcaccgcgatcgcgataagtacgcagcaatttaaagacatcatcacggacaaactcagccttgctcagatccagtttgttcagctcaacgttctgccgtgcaatatccagcgcttcctgggaggtatcaacgctgacaacctggctgcaaccgcccatcagtgccgatacggcgaaaccaccggtataggagaaacagttcagcacacgtttattttcaacgtagcggcgggtagccaggcggctatcacgctggtccaggtagtagcccgttttgtgtccgtgctgaatatccaccagcagtttcatgccgtgttcttcaatcggcagcagggcaggtggcaactcgccggtgacgaggccctgggtcagctccatcccttcttttttacgtaccgcaacatcgctgcgatcgtaaatcgcacattccgggtacagcgtttgcagggcactaattaatgccgcgcgctgatattctgcgccagcactcagcagttgcagcaccagaaaattaccgaaacgatcgatagtaatacccggcaggccatcagattctccggcgattaaacgatagctgtcgaggccatctttttgcgccagccagtcacgccatttttgtgcttgttgcaaacggcgggaaaaaaaagcaatgtcgatagactcagacgggtcaaacgtccagacgcgcgcccggatttgcgaagctggtgaataagcgccgcgtgctaaccattttccctgatgatcaacaatatcgatggtttcaccgaggctggctttaccttccatgcgggcaacggccccggaaaagacccacggatggcgacgaagtaatgatttttcgcgccctttggctaacactaaacgtacactcataatttacttttctgtcgatgcaaagaaatgggcgtcattgtccggagttttccatggatttgcaacgcgtccattaaggataaggagagcagcaatgtcgaaagtctgcataattgcctgggtttacgggcgagttcagggcgtaggatttcgctacaccacacagtacgaagcgaaaagactgggtttaaccgggtacgccaaaaatcttgacgatggcagcgtggaagtggttgcctgcggtgaagaagggcaggtggaaaaattaatgctgtggttaaagagtggcggcccgcgttctgcgcgtgtggaacgggtgcttagcgagccgcatcatccctcgggggaattagccgattttcgtatccgttaaatacattttaccggttttggcaggccagcaattttggtggcttgcttagccggacctttcggaaacagtcgatataaatagcggctgttacctttttcttcgccaaatttattcgccatcgcttttaccagcatacgaatcgccggagaagtattgaattccagatagaaatcacgcacaaaacgcaccacttcccagtgttctggcgacagcgaaatcccttcgttctctgcaatcaccacagccagcggctcactccactggctgctttctttgagatagccttcggtatccgtttctatctctttaccttcgaagatcagcataattattactaccttaatcagactggcggcagtgtaacaaaaaacaaagccccgcataaagcgaggctatgaaagtgttagcgggtgagattaatcgcggctagcgaagcccagaatgctcagcaggctgacgaagatgttgtacagcgaaacatacaggctaaccgtggcacgaatatagttcgtctcaccgccatgaatgatgttgctggtttcaaacaagatagcgccagaggagatcagaatgaagaccgcgctgatcgccagatgcagagcaggcagttgcaggaagatattagcaaccataccaatcagcaccaccacaatacccgccatcagcataccgccgaggaacgacatatctttgcgggtggtcagcacatatgcagagcagcagaagaacactaacgccgttccgcccagtgccatagcgattacgtcacccattccggcagacagataggtgttcagaataggtccgaggatataacccagaaaaccggtaaaggcgaatgcggagataatcccggtcggcttattcgccgttttataggtcaggaacatcaaaccatacatacccaccagcgtcagaatcagacccggagatggcagcatcagcaccgtactggcagttgcggtaatcgccgaaaaggccagcgtcaggctcagcagaaaataggtattacgcagcaccttatgggtgctaagcagtgatgtacggtcatgtgaagaactaacaatacgatccattgagtcactctctatgacagatgtaattaattaagcagcataatgataatgcgtaagggcacccagaagttttacccatctttacgcatttgatctggaacaggtttaacagcggattatcaggtcattaagcaaatataacgccctgagaatttcgacaggcaaaagaaaaaggggttagcatttagctaaccccttatcttatttggcggaagcgcagagattcgaactctggaaccctttcgggtcgccggttttcaagaccggtgccttcaaccgctcggccacacttccggaatgacgcgcactataaacatc

SEQ ID NO: 119 - DNA, 646 bp, Escherichia coli
  modified_base (10)..(10): a, c, t, g, unknown or other
  modified_base (24)..(24): a, c, t, g, unknown or other
  modified_base (630)..(630): a, c, t, g, unknown or other
  modified_base (636)..(636): a, c, t, g, unknown or other
  modified_base (644)..(644): a, c, t, g, unknown or other
gaacaaaaanttcaccggagtttncgtcgataaattcccgcaattgtaacagtgcatcatctaacgggatttcatcggtcataatggcagattgcgcttcgcgtgattgcttaagccaccttttaatgacgtcacgatcaatgactccgccagcagtttccagatcgatagtcttactaaattccggtcccatatctccggtttgcggatcgaaaaatattgcacctattgagataatcggggcatcaggattttttcccatggtttcaaggtcgatcattagatggtcacacgtcctgctggtggatgtgataacgtgatgaccgttcatcgtaattaagggatctgccgtctcgccagtttcactatcgctggcgtgatcctgagcgctaccagcattctccttgtgtggatgttcagcgccttccatttccttcggatcattttcctgaacttcaacctgattctcttcatcgaatgtttcctggtatgttgcgtcacccatcaccgcgccacaatcagggcagttgccgccaccgctttgaccgcaggcggtgcagactttttccggttcctgttgcgctactggctcaggttgttttgtttctggctcgttttgtwrcgyatttnggctgntttgttcngc

SEQ ID NO: 120 - DNA, 642 bp, Escherichia coli
  modified_base (601)..(601): a, c, t, g, unknown or other
  modified_base (605)..(605): a, c, t, g, unknown or other
  modified_base (611)..(611): a, c, t, g, unknown or other
  modified_base (614)..(617): a, c, t, g, unknown or other
  modified_base (624)..(624): a, c, t, g, unknown or other
  modified_base (628)..(628): a, c, t, g, unknown or other
  modified_base (633)..(638): a, c, t, g, unknown or other
  modified_base (641)..(641): a, c, t, g, unknown or other
gtttccactgcatcagtttctggtactggcgacgagagagtatcagttgcgctctgatttcttccttcatcttcaaacacgccctttgtagtcaggtattcagtaatgtatttgttcagtgccacagggtctttgtgaatgtcgatcggacgttcacggacaaggccaaaaatagtctggcggtcgtagcgaagggcatcaggctgtttgcgcattgatgccgagatacgcttccagtcttcgcggtcgttgtcgataacttcattttttgcccagcgatggatgctgccgtcaatgtttccggcatccacatcaccaggccagagagcgtaggccagttcgtcatccagtgttttccatgtctgcttgtattcgcgatgaatggcagcaatgaccgggctgatttttcctgttgaattttcactgtgctgttgattggttctggcgcgggcgagatcaacaacagacgtgtattttccggtttccttgcgttcaccttcgcgacgtttttccagatgcgcatctctgcctgaatttcgggccatttggcaccaggcttacatttatgcttaacccacccgatggcatgcagcttaagctncggntacatngcnnnnacttctngcantttcnnnnnngcnt

SEQ ID NO: 121 - DNA, 465 bp, Escherichia coli
gatagtgacaccaatttcaaaacaaccttcagacgtattaacgtttggtaataacgtttccattatcgcgtcctcaacaatgaattttgtgatgcggtgcctggtgcctccaggtgacgttaaccagttaacaattaacgccggatacagagaatccacccataacactgtttttggttttaactgttccgcgtgcgctcagccgcattcaccacatcacaaaattcactttaaaaagggcggcagagcagtcacggagtaaaactgataccgccaaacgtcaccagaaaattgataacagagggcgttgcagcggggttgtcacttaagcgtatggtcaacctgacaacccggtgtcctcaacggggaaggaataaccccgccatacttaccgccgcgccatttcgcggattgccacaaccggaagcgcacggtcgacgaaaatttaacgacaggctatctatg

SEQ ID NO: 122 - DNA, 586 bp, Escherichia coli
  modified_base (557)..(557): a, c, t, g, unknown or other
  modified_base (563)..(563): a, c, t, g, unknown or other
  modified_base (575)..(575): a, c, t, g, unknown or other
atgctgccagtcgagaacttcgtcgcgcsaaaaracaggtccagaagtgggagcgagtctgcgccgcgctgcgggagctgaacaagcaccgggatattgttcgacagattgtcgattcatccggtcgtattgtgtcggaaaagtgattgccggaggcgcttatggcaaaagtttttacacaagaagagcgggagaaaattaaagggcaggttgttgaactcgtacgccagagtgggcgcgagacgttacgacaactggaaactaaaactggggcaacaagatatctgatgagcgttctggccagagaactggttgccagtggcgatgtatacaactctggttacgggttattcccgtctgaacaggcgcgtaaggactggcaaaatgctcgcaaaaaactctcaagggcaaaggtgaagaaacctgcagtggttgatccggaccttatctggtcgttaccwgacggmgaaatacgtcgctacgacaggcgtcagaacataatctgtcgcgagtgccggaagagcgaagttatgcagcgcatattgtcgttttatcanggtaantttcaggaggtngcgcagtgagt

SEQ ID NO: 123 - DNA, 449 bp, Escherichia coli
  modified_base (144)..(146): a, c, t, g, unknown or other
  modified_base (161)..(162): a, c, t, g, unknown or other
  modified_base (168)..(168): a, c, t, g, unknown or other
  modified_base (171)..(171): a, c, t, g, unknown or other
gttaagtagaataactgcgggtgcttgaggctatctgtctcaggcatgaacaccgaaaggcagatagagaaaagccccagttaacattacgcgtcctgcaagacgcttaacattaatctgaggccatatctatgcgacacatannnattagcctcttacgnnccgaanggncaaggagaagcaggctatgaagcagcaaaaggcgatgttaatcgccctgatcgtcatctgtttaaccgtcatagtgacggcactggtaacgaggaaagacctctgcgaggtacgaatccgaaccggccagacggaggtcgctgtcttcacagcttacgaacctgaggagtaagagacccggcgagggagaaatccctcgccacctctgatgtgtcaggtatcctcaccctccccaatcacattagccccgcacttccgtacggggccatttctgttaa

SEQ ID NO: 124 - DNA, 456 bp, Escherichia coli
  modified_base (6)..(7): a, c, t, g, unknown or other
  modified_base (17)..(20): a, c, t, g, unknown or other
  modified_base (22)..(23): a, c, t, g, unknown or other
aattcnnccgttcttgnnnncnngcacgagcggtattctcacgcatttaagtcagactggtaccarcayccmccatgyactgaagaacaggccgaatggctmattcatarytaccgcagrcgcggatrcgagrttaaraaagcctcagcctcgattatcgtcactggataatctccgtcaggcttccttactctgaacgcccaccgcgtccgtcccgcacattccagcaacgcatctggaggtaacgtgcgggtattacttcgacctgttctggtaccggaactcgggctggtgatcgttaagccgggccgtgaatccatgccggtattccacaatacccgggtactggtggagccggaaccgaaaagcatgcgtaatctgccgtccggggtcgttcctgccgttcgccagccgctggcggaggataaatcattactgccatttttcagcgacgaa

SEQ ID NO: 125 - DNA, 433 bp, Escherichia coli
tggtgttgtgctggcactgcgacaaccagctgcgcgaccagacctccgaatcactcgggcaacttgctcaccaaaacctgtttgcatggatgattgacgtcatacgccatgcaatgaatggctcgcaggaacgggaattatcgctggctgaattatcctggtgggcggtccgcaatcaggtggcggacgcgctaccggaagcggtattacgtcgttcgctggggttgcgtgcggaaaaaatccgctcaatgtaccgtgaaagcgacatcgtaccgggagagcagaccgccaccagcatactgaagcagcgcacaaaaaatcttgcgccgctgcctcacgcccaccagcaaaacccgccacaggaagagacggtggtcagcattgccgttgatcctgagtctccggaatctttcatgaaacgacctaaacgtcg

SEQ ID NO: 126 - DNA, 268 bp, Escherichia coli
atgctcatagatttggttttaccttacccgccgacggtgaacacttactggcgacgccgtggcagcacatattttatctcggaggagggaaagcgttatcgccgggctgtggcgcttattgttcgccagcagcggctgaaattaagcctgtccggaaggctggcgataaaggtgattgcagagccaccggataagcgtcgtcgcgacctggacaatattctgaaagcaccactggatgcgctgacgcatgccggacttctcatagacg

SEQ ID NO: 127 - DNA, 3404 bp, Escherichia coli
  modified_base (3398)..(3398): a, c, t, g, unknown or other
cttctmatrgacgaygagcagtttgatgaaatcaatatygtkcgyggtcagcsmgtwyctggkgggcgkmtgggcgtgaagatttaccccataatgcttgaagggcaggtcaaaaaatgaaactggaagatttaccgaaatactactccccaaaatcccctggcctgaccgatgcatcggcctcaacgtcaaaagatgcgctgagtatcactgatgtgatggccgcgcagggcatgacacagaatcgggctgagatggggttttctgcgttcctggggaaaatgggcatcagtatgaatgacagggcgcgggcaacagaattactggcagattatgcactcagtcggtgcgatcgtgtggcggcgttgagaaaacttccggcagaaataaaaccggtagtgatgcgcattatggcttcgtatgcgtttgaagattatgcccgtagcgcggcgagcaaaaaacagtgcccctgctgtcacggaaaaaaatttattgaaagcgaaggtttttacaaacaagrtccagtatccggatggtaagccaccagtgtgggcaaagtgcacaaaaggcgtgtatccgtcttactgggaagaatggaaaaaagtcagggaggtggtaaaagttgcctgtccggagtgtggcggaaagggtgaggtttccaccgcctgtaaggattgccgtgggcgtggtgtcgccattcatcgtgaagagtcggtaaaacgtggtatgcctgttatcagagattgccagcgttgtggtggtcgtggctgtgaaaggctgccatcaacggaggcatttaatgccatatgcaaagtgacgagtgctatcacgcttgatacgtggaaaaatcagtgaaacgcttttacgatacgttggtggttcggtttgacattgaagaggcatgggcggagcggcagttaaagagggtaacgcgatagtgttgttgatttttcccgaatctgtggtaaatttgctctaacgatgggcgttttatgcctgacgttagaagattttttacactccgccgcctggcgggttttttatgactgaaatcgcgtcagtacagtaaacgcgctggtggcggtgaatacctgtctttcagcttgctggctttttcgacaagagttattggtgtgtcacgttaaccggaaaagggaaaaagacatgctaaaacagcaggatatgacagaaaccgccagagtggtgtttaatgaattaagcgttaacgacccggcgacagtcggggagattgcgcagaatacttacctttcacgcgaacgctgccagttaatactgacccagctggttatggcgggtctggcagactatcagttcggttgttacagacgccttccgcagtgaaggcttttttatttgtggtaaatgggcggctggtgggtgttaggggcacccaccagccatctgctcatgcgttgggttcacaagcacacctcaggcccactgctttgcgcaaaagcagaatgagcctatcagagacaggcttaatgatccatgcttaatactgtaaaaatatccagttgtgagttaatcaacgccgactgcctggaatttatccggtcgttacccgaaaattctgttgacctgatagtcacggacccgccgtactttaaagtgaagcccgagggctgggataaccagtggaagggcgacgatgattacctgaagtggctggaccagtgtctggcgcagttctggcgggtgctgaaacctgccggaagtctttacctgttctgtggccatcgcctggcatctgacattgaaatcatgatgcgtgaacgcttcagtgtgctgaaccatattatctgggcaaagccgtccggacgctggaacgggtgcaacaaggaaagcctgcgggcgtatttccccgccacagagcgcattctgttcgcggaacattatcaggggccgtatcgtccgaaagatgccgggtatgcggcgaagggcagtgcactgaaacagcatgtgatggccccgctgattgcttactttcgtgatgcgcgcgctgccctggggataacggcaaaacagattgcagatgccacaggaaagaaaaacatggtgccgcactggttcagtgccagtcagtggcagctaccgaacgaaagcgattatctgaaattacagtcgctgtttgcccgggtggcagaagagaaacatcagcgcggtgaactggaaaagccccaccaccagctggtggatacgtatacgtcactgaaccggcagtatgtggagctgcagagtgaatataagcatctgcggcggtattttggtgtgacggcgcaggtgccgtacacggatgtgtggacacataaaccggtgcagttctatcccgggaaacatccgtgcgaaaaaccggcagaaatgctgcagcagataatcagcgcaagcagtcgtccgggtgacctggttgcagatttttttatgggctcaggttcaacggtaaaagctgcactggcgctcgggcgtcgtgcgattggcgttgaactggagaccggacgttttgagcagacagtcagggaagttcaggatttaatcgtttgaaacggatgagattgcagaattaattacgcaccattattattctgcttccggccctttagctcagtggtgagagcgagcgactcataatcgccaggtcgctggttcaaatccagcaagggccaccatatcacataccgccattagctcatcgggatagagcgccagccttcgaagctggctgcgcggggttcaagtccccgatggcggtccattatctgcatcatgcgttgttagctcagccggacagagcaattgccttctragcaatcggtcactggttcgaatccagtacaacgcgccakacttattttccccggctcgcttttgcgggccttttttttaaatgtcttcacaattcagacggttgacagttgtctgttttgcggggagtttgttaaaagaaactggcatggtgaatccccctgtgcggaggggcaatcagcgagtaggtatatgggataatcgcggattcaggtgctggtactgaattcaccgggaggcacccggcaccatgcaatggcacatagcgccactctccagcccctctccggaggggctttcttatggacaaaaaagcccgcgctgggagacgcgggcggcaaggaatgaacaatgaaacgtgaagtaatatttcagctggcgaataataccccatagtaatcactctgcgcaactgcgcggcctttttcgaattgcgggctgtagtctcccttctgccattgtcctgtaacttccggacttcagcccgctcctcatctgactcacacattatcccgaccgggaggattcatggcatttaaacactatgaygtggtcagggcggtgtcgccgtcagnccttgc

SEQ ID NO: 128 - DNA, 572 bp, Escherichia coli
  modified_base (325)..(325): a, c, t, g, unknown or other
  modified_base (328)..(328): a, c, t, g, unknown or other
  modified_base (337)..(337): a, c, t, g, unknown or other
  modified_base (345)..(350): a, c, t, g, unknown or other
gtagtccggtggccataaccccttataccctgatgcaggcgattgcagcagaaggtgatgtggtcgtcagtggtgcaactgagccggagtggtactacgtcatcgtactggccgggcagtccaatgccatggcttacggtgaaggcttccgcttccggattcatacgatgcgccccatccgcgcattaagcaactggcccgtcgtaacacagtgactcccggtggtgaagtatgcgtatttaacgacatcattcctgctgaccattgtctgcatgatgttcaggatatgagtacgattaaccatccccgggctgacctgagcaanggncagtacggntgtgtcgnnnnnngcttacatattgccaaaaaactgcttccgtatatccctaataatgcggggatcctgctggtaccatgctgtcgtggtggttcggcattcacccagggcacggaggggacattcagcgagtccacgggggccagtcaggattcggctcgctggggagtgggtaagccgttatatcaggatctgctttccgcacgaaggcagcattgcagaaaacccgaaaaac

SEQ ID NO: 129 - DNA, 227 bp, Escherichia coli
  modified_base (14)..(14): a, c, t, g, unknown or other
  modified_base (17)..(17): a, c, t, g, unknown or other
  modified_base (19)..(22): a, c, t, g, unknown or other
  modified_base (24)..(26): a, c, t, g, unknown or other
agccagcagcattnctngnnnngnnncagcagttccgtgctgaccttgccgggctggcrgcgcagtgtcacggtggaagtccggcatcagtcccctggatttgtggcgacacgacatacgcgtggaaacaagaacacggtacgcaatatgaagtggtatatggtgcatataaaggtaaagaatcccagcagatttattttgttccctttatgaccgatggtagcgga

SEQ ID NO: 130 - DNA, 4527 bp, Escherichia coli
cacgacatacgcgtggaacaagaacacggtacgcaatatgaagtggtatatggtgcatataaaggtaaagaatcccagcagatttattttgttccctttatgaccgatggtagcggagttaatacaccgacaaacaacccgtcagaagatcctgatattgccgggtctggttattacggttcggcatcccgaacgaacaaaaactgggtatcatcaaatcgcccgacgcatttcagctcatgggcgcgtcgtggcattattcccgatcgtatggcaactgctattctgaacgtagccgggcgcacctcagccttcatcagtggtaaggcaccggaaatcaaaccctcgcccggcgtcgacacgccatcggggccgtctgaagatgcatccgtacgcacaatctccctgttgccgacagccggagatgctgctgcgcagggctggaccattaaggacggcggaattcagttgtcgggtggtgtatttaagatcgccaagcagagcaataaagcctggtccctgacgcgcccggtggatgacgcagtctccctgctgacacggggtggcagactgagctgtaagtttcgactgtcaggcgcactgaccaacaaccagttcggtctgggaatttatctgtataccgatgtagcgttacctgacgtcgtggcgatgaccgggactggtaacccgttcctgatgtcgttcttcacccagaccacagacggcaaactgaatctgatgcatcacaagaaagcaggaaacacaaagttgggcgagttcgggaattacagtaacgactggcagacgctggagctggtgttcaccgccggcagtgccacggttactccgaaactgaatggagtggctggcccggcattccaggtcataaaagacagtctgacagtgggactaaatgcactgacgctgacggatattaccaaaaatgcaacgtatggcgttgagatagaaagtctggtgctggagataaatgcaccggcatcatcataaaaagtgagccagtcaaatggaaggtatcgttaaactcaccggtagtgtcagtgggtcgtctgagatgcctgcatgagttatcagagccatcagtacttaactggtggcttttttattgttgtcagcttccggataacgggagacggggtatgtaccagatggaaaaaatcacaacaggtgtgtcatacaccacgtcagcggtgggaacgggctactggttcctgcagttgctggacagggtttccccgtctcagtgggcggcaataggcgtgctggggagtctgctgtttgggctgctgacatatctgactaacctgtatttcaaaatcagagaggaccgtcgtaaggcggcgcggggggagtaaagcgatgaagaaaaaatacgaactgggtgttaaagggataaataattatccggataagattactgttactgtggcactggaaattggtgggtatccgtcactgttgttgccagatgtggcgattagtcttgaccgtactgaaggtgccacgctggagttttacgaagctgaggcgaaaaagcaggcgaagcagtttttcatggatgttgctgccgggttatgtgaagggaacgaaccgttgccggaaaagcgccccataattttagaggcgcaggatgtgttgataacctacaaaggaaagctaccgggaagaattactggttctctgaagatgccgccgtcaacactgcggtcagaaaaagaggcgtcttgtctgcagtctgagtactccattacggttaaaagtgccggagaggaaggaaataaacgttattttattgcgtctgcacctgataaagatcaggaatgggagtgtaaccggccatcctttgttgtatacggagatggcgggaaaataaccatctcagaaaatgggaaattaacaccgccatcgcaccagcatagtgaggcgctcattgaatttgccattgattacctgaagaacaataaaaagcaggggctgatgaagcgcgttggccgttgcatgggatatctgcagatagctgctgagattgaaatgatggccagtggtgctgacaatgatgcagttgtgctggaggctcttctgcgtgattttgataatacgcctttaagaaagcacctgttgactggatgcagccggggatgacttatctgaaagggcgtatataaggtggctcgttatctgttgctggataatcgactgaagatgcgttctttttgtgtttttgcgtaatgattgtcccactcacaatcaaggtagcttaattcttcattcaaccagttatttatattggtcttaatacgcataagcatgggctgtgttaatgctctggcgataatgccgagagtcacaggtgtgagatgtccatacggctcagcctgaatggattttactgcatcgtgttcttgtgggaggagtaagaggcactctgattttacccgctcatttatggcttgcaggcataaatcataattatgttgatcgttatgcatggttaatcctctactgaaattgtcagatatatttcagccatcaggaaaaacgccagtgtcctaccgctggcgggctgaagatttaacatatccagggattcggaaccgataaatcctgataaatatccatgaacaccaaaatcaaatatggcctgtcggctgccgttctggcgttgattgccatcggtgcgcctgcgcctgatattctcgaccagtttctggatgaaaaggaaggcaaccacaccacggcataccgtgatggtgtgggtatctggaccatctgccgtggtgccacccaggtggatggtaagcttgtcgtccccggcatgaagttgtcgaaggaaaaatgcgaccaggttaatgccattgaacgggataaggcgctggcatgggtggagcgcaatattaaagttccactgaccgaaccacagaaagcgggtatagcgtcattctgtccctataacattggccccggtaagtgtttcccgtcgacgttttataagcggctgaatgctggtgaccgcaggggagcgtgtgaggcgattcgctggtggattaaggacggtggcagagactgccgtatccgctcaaataactgttatggtcaggtatcccgtcgtgaccaggagagcgcgctggcgtgctggggaatcgacagataagcagaatattttgctgaaaaataaggtatggccacgcgggcggataacacgaaatcctgcgaactggcgaaatgtaagtgaataaaagtaaaaaccccgtttgttggcagcaagcggggttttgtttttatggcagtaagctatgggaggctgccttgattgattttagcaaactgattagggagttgcgactcatgattagtcaattaccaaactggaaatttttgctggtctggagcatcccttttttatgggtagtatcccagttaattgtggcaattaaggggtagctatgtcagacaaactcataacgcyggcraagrtcctctgtgtaattgtcggcatttcattttcactaatgctggttgctctttttctttccatsgcctggatgatgttgtcttcgtcggggctgctggggtgacagtgactgatgacatcagcagagcgctggcttttgctattaagtgggtggctgttggtattgctgtgtctccgatgctgtatgggctggcaaaactggtcattgcgctgaaatcgtgaactttaaaaagatgagtgctgaacttattcgggcaatggcatttgccattcgtattgtggccattgctgttctggtctggacaatccgttggtggtgatatgaaccgtgttctgtgtgtggtgattattgtcctgctggtagcctgtggtgtgcttagtctggggctgaatcattaccgtgataacgccattacctacaaagcccagcgcgacaaaaatgtcagagaactgaagctggcgaacgcaaccattactgatatgcaggtgcgccagcgcgatgttgctgcgctcgatgcaaaatactcgagggaattatccgatgcgagagctgaaaatgaaactctgcgcgctgatgttgccgctggtcgtaagcgcctgcggatcaacgccacctgtccaggctccgtgcgtgaagcccccaccacctccggcgtggataatgcaaccggcccccaactggcagacaccgttacacgggattatttcaccctcagagagcggctgatgacgatgcacaagcaactggaaggggcacaggactatatccgcactcagtgcctgaaataagttttgttgatgcgccgtatcgtcgctgtattccctcattaacagagaccgcagcccgacagggagactcctctgcgcgagtgtgcggggataatcaaaaacgatacacaccggggtttaccgcgttaacggagcgcggcgttgtcccctcatagtcgcctgtccggtgcgatggtggaagaagccggatgttttatcactattaattgatgacacagaaatggattcattgaatttcagcacgtttt

SEQ ID NO: 131 - DNA, 293 bp, Escherichia coli
gcaggtkagygtggaagatctygtcagaaccggcgcgtttctggtggcgatgtccctgtggcataaccatccacagaaaacgcagtcaccgtcaatgaatgaggccgtgatgaagatagagcaggaagtgctcaccacctggcctgccgatgccattgcccgggcggaagacgtggtgttgtgcctgtccgggatgatcgaagctgttcgtccggatactgatattactgaagtggcgaaaaataacacgctgactgatgatgatttttctgcgggaaagtcttcgacggcga

SEQ ID NO: 132 - DNA, 814 bp, Escherichia coli
ctgttgarcagggcctgagccgccaggcgctggctgcacaaaaagccgggatttccgtcgggcagtataaagcggccatgcgaaccctgcccgcacagtttacggatatcgccacgcagcttgccggtggtcagaatccctggttgatcctgctgcaacagggcggtcaggtgaaggactccttcggcgggatgatccccatgttcagggggcttgccggtgcgatcaccctgccgatggtcggggtcacctcgctggcggtggcgacaggtgcgctggcgtacgcctggtaccagggagattccacgctttcagcgtttaataaaaccctggtcctttccggcaatcaggccggactgactgccgatcgtatgctgacgctctcaagagccgggcaggcagcagggctgacgtttaaccaggcgagagagtcactggcagccctggtgaatgccggtgtgcgtggtggtgaacagtttgatgccatcaaccagagtgtcgcgcgtttttgcgtctgcatccggtgtggaggtggataaagtcgctgaagccttcgggaagctgaccactgaccgacgtcgggactgatggcgatggcgcgccagttccgtaacgtgacggcagagcagattgcgtatgttgcacagctgcagcgttccggagacgaggccggggcattgcaggcggcgaacgatatcgccacgaaaggctttgatgagcagacccgtcgcctgaaagaaaacatgggaacactggagacctgggcggataaaacagggaaggcattcaaatcgatgtgggatgccattctgga

SEQ ID NO: 133 - DNA, 316 bp, Escherichia coli
atgtgggatgccattctggatatcggtcgtccggaatcctcagcggatatgctcgccagtgcgcagagggcatttgatgaggcggataaaaaatggcagtggtaccagagccggagccagcgccggggaaagacctcctcttttcgtgcgaaccttcagggggcatgggatgaccgggaaaatgcccgtctgggtctggcagcggccacgctgcagtcggatatggaaaaagccggtgaactggcggcaagggacagggctgagcgtgagtcgtcacagctgaagtataccggagaggcgcagaaggcgtatgagc

SEQ ID NO: 134 - DNA, 1097 bp, Escherichia coli
  modified_base (3)..(6): a, c, t, g, unknown or other
  modified_base (9)..(13): a, c, t, g, unknown or other
  modified_base (17)..(19): a, c, t, g, unknown or other
  modified_base (22)..(24): a, c, t, g, unknown or other
  modified_base (36)..(36): a, c, t, g, unknown or other
  modified_base (50)..(53): a, c, t, g, unknown or other
  modified_base (55)..(55): a, c, t, g, unknown or other
  modified_base (68)..(68): a, c, t, g, unknown or other
  modified_base (73)..(73): a, c, t, g, unknown or other
  modified_base (229)..(229): a, c, t, g, unknown or other
  modified_base (232)..(233): a, c, t, g, unknown or other
  modified_base (237)..(237): a, c, t, g, unknown or other
  modified_base (242)..(242): a, c, t, g, unknown or other
  modified_base (1036)..(1036): a, c, t, g, unknown or other
  modified_base (1039)..(1039): a, c, t, g, unknown or other
  modified_base (1053)..(1053): a, c, t, g, unknown or other
aannnnacnnnnnaggnnnagnnngcgtatgagcgnctgctgacgccacnnnngnaatataccgcccngcagnaagagctgaataaggccctgaaagacggaaaaatcctgcaggcggattacaacacgctgatggcgtcggcaaaaaaggattatgartcgacgcagaaaaagccgtccggtgtgaaggtgtctgccggtgagcgccaggaagaccaggcgcatgcanccnngctngcgcntgaagctgagctcaggacgctggaaaaacacagcggtgcgaatgagaaaatcagccggcagcgccgtgatttatggaaggcggaaagtcagtatgtggtcctgaaagaggccgccacgaaacggcagttatctgagcaggaaaaatccctgctggctcatgagaaagagacgctggagtacaaacgccagctggctgagctgggagacaagattgaacaccagaagcggctgaatgagctggcacagcaggcggcgcggtttgaacagcagcaaagcgcgaagcaggcggcaatcagcgcaaaagcccgcggcctcaccgaccgtcaggcgcagcgggagtcggaagagcagcgccttcgtgaggtgtacggtgataatccggctgcgctggcgaaggccacatcggcactgaagaacacctggtctgcggaggagcagcttcgtggaagctggatggccgggatgaagtccggctggggagagtgggcggaaagtgcgacggacagtttttcgcaggttaaaaacgcggccacgcagacctttgatggtattgcacagaatatggcggcgatgctgaccggcagtgaacagaactggcgsggattcacccgttccgtgctgtccatgatgacagaaattctgcttaagcaggcaatggtggggattgtcgggagtatcggcagcgccattggcggggctgttggtggcggcgcatccgcgtcaggcggtacagccattcaggccgctgcggcgaaattccattttgcaaccggaggatttacgggaaccggcngcnaatatgagccagcngggattgttcatcgtggtgaatttgtcttcacgaaggaggcaac

SEQ ID NO: 135 - DNA, 3477 bp, Escherichia coli
  modified_base (12)..(12): a, c, t, g, unknown or other
gaacagtacacnggtgctggacagtgaggggaataccaacatctccggtgtyacggtggtgttccgggcaggtgagcaggagcagacaccgccggagggatttgaatcctccggctccgagacggtgctgggtacggaagtgaaatatgacacgccgatcacccgcaccatcacgtcggcaaacatcgaccgtctgcgctttaccttcggtgtgcaggcactggtggaaaccacctcaaagggggacaggaatccgtcggaagtccgcctgctggttcagatccagcgtaacggtggctgggtgacggaaaaagacatcaccattaagggcaaaaccacctcgcagtatctggcctcggtggtggtggataacctgccgccgcgcccgtttaatatccggatgcgcaggatgacgccggacagcaccacagaccagctgcagaacaaaacgctctggtcgtcatacaccgaaatcatcgatgtgaaacagtgctacccgaacacggcactggtcggcgtgcaggtggattcggagcagttcggcagccagcaggtgagccgtaattatcatctgcgcgggcgtattctgcaggtgccgtcgaattataacccgcagacgcggcaatacagcggtatctgggacggaacgtttaaaccggcatacagcaacaacatggcctggtgtctgtgggatatgctgacccayccgcgctacggcatggggaaacgtcttggtgcggcrgatgtggayaaatgggcgctgtatgtyatcggccagtactgcgaccagtcggtgccggatggttttggtggcacggagccgcgcatcacctgtaatgcctacctgaccacacagcgcaaggcgtgggatgttctcagtgatttctgctcggcgatgcgctgtatgccggtatggaacgggcagacgctgacgttcgtgcaggaccgaccgtcggataaggtgtggacctataaccgcagtaatgtggtgatgccggatgatggcgcgccgttccgctacagcttcagtgccctgaaggaccgtcataatgccgttgaggtgaactggattgacccggataacggctgggaracggcaacagagcttgtggaggacacgcaggccattgcccgttacggtcgtaacgtcacgaagatggatgcctttggctgtaccagccgggggcaggcgcaccgcgccgggctgtggctgattaaaacagaactgctggaaacgcagaccgtggacttcagcgtgggtgccgaagggcttcgccatgtaccgggcgatgttattgaaatctgcgatgatgactatgccggtatcagcaccggtggtcgtgtgctggcggtgagcagccaggcccggacgctgacgctcgaccgtgaaatcacgctgccatcctccggtaccacgctgataagcctggttgacggaagtggcaatccggtcagcgtggaggttcagtccgtcaccgacggcgtgaaggtgaaagtgagccgkgttcctgacggcgttgcagaatacagcgtatggggactgaagctgccgacgttgcgccagcgcctgttccgctgtgtgagtatccgtgagaacgacgacggcacgtatgccatcaccgccgtgcagcatgtaccggaaaaagaagccatcgtggataacggggcgcactttgacggcgaccagagcggcacggtgaatggtgtcacgccgccagcagtgcagcacctgaccgccgaagtcactgcagacagcggggaatatcaggtgctggcgcgatgggacacaccgaaggtggtgaagggcgtgagcttcctgctccgtctgaccgtaacagcggacgacggcagtgagcgactggtcagcacggcccggacgacggaaaccacataccgcttcacgcaactggcgctggggaactacacgctgacggtccgggcggtaaatgcgtgggggcagcagggcgatccggcatcggtatcgttccggattgcggcaccggcagcgcctgtcactattgaactgataccagggtattttcagataacagcggtcccgaaactggctgtatatgacccgacggtgcagtttgagttctggttctcggaaaagcggattatcgatatcaggcaggttgaaaccagcgcgcgttatcttggtacggcgctgtactggatagccgccagtagcaatattaagccgggttatgattattacttttatatccgcagcgtgaacaccgttggtaaatcggcatttgtggaggcagttggtcgggcgagcgatgatgcggaaggttatctgaatttttataaagggttgatcaataaaacgcatctcggcaaggaactgctggaaaactttgagctgacggaagataacgccagcaaactggaggagttttcgaaagagtggaaggacgccaacgataaatggaatgccatgtggggcgtcaaaattgagcagaccaaagacggcaaacattatgtcgcggggcttggcctcagcatggaggatacggaggaaggcaaactgagccagttcctggttgccgctaaccgtatcgcgtttattgacccggcaaacgggaatgaaacgccgatgtttgtggcgcagggcaaccagatattcatgaacgacgtgttcctgaagcgcctgacggcccccaccattaccagcggcggtaatcctccggcattttccctgacaccggacgggcggctgacggcgaaaaatgccgatatcagcggtaacgtgaatgcgaactccgggacgctcaacaacgtcacgattaacgagaactgccgggttctgggaaaactgtccgcgaaccagattgaaggcgatctcgttaaaacagtgggcaaagctttcccccgtgactcccgggcaccggagcggtggccatcagggaccattaccgtcagggtttatgacgatcagccgtttgaccggcaaattgttattccggctgtggcattcagtggcgctaagcatgagagagagcatactgatatttactcctcatgccgtctgatagtgcggaaaaacggtgctgaaatttataaccgtaccgcgctggataatacgctgatttacagtggtgttattgatatgcctgccggtcacggtcacatgacactggagttttcggtgtcagcatggctggtaaataactggtatcccacagcaagtatcagcgatttgctggttgtggtgatgaagaaagccactgcaggcatcacgattagctgaattttataacccagatacgggcgccagaaatggcgccttttttattgcagaaaagcgagaggtaattatgcgtaaattatgtgctgttattttgtccgcagtagtctggcaggtcgccgctgctacgccagcgagtgcagcagaacatcagtccacgctgagcgcggggtatctccatgcctcgacgaacgttcccggtagtgatgatctgaacgggatta

SEQ ID NO: 136 - DNA, 2839 bp, Escherichia coli
ccttcagttatgccaatgctgaggatgagcaaaaacgcgctacagcgatacccgctggcatgaagattccgtgcgtaaccgctggttcagcgtgatggcggggccgtctgtacgcgtgaatgaatggttcagcgcgtatgcgatggcgggtgtggcttacagccgtgtgtcgactttctccggggattatctccgcgtaactgacaacaaggggaaaacgcacgatgtgctgaccggaagtgatgacggtcgccacagcaacacgtctctggcgtggggggctggcgtgcagtttaacccgaccgaatccgtgaccattgaccttgcttatgaaggttccggtagtggcgactggcgaacggatgcatttattgttggtatcggataccgtttctgacaacagacgccgatttatcttctgtaaatattgttatgatacgcaggttcatccaccttatggggtgaactgcgtttgaggaaacgtaaagttacactgtcctgaagcccgtggcgtcactgctgcgggctttttttattggtggaaaagtatgacagtaaaaatttctggcgtgcttaaagatggcacaggaaaaccagtacagaactgcaccattgtgctgaaggccagacgaaccagcagcacggtggtggtgaacacggtggcctctgaaaatccggatgaagccggacgttacagcatggatgttgagcatggtcagtacagcgtcaccctgctggttgaaggttttccgccttcacatgccgggaccatcaccgtgtatgaagattcccgacccggtacgctgaatgattttctcggtgccatgacggaggatgatgcccgtcctgaggcactgcgccgttttgaactgatggtggaagaggtggtgcgtaacgcagaggaggcgaagaagaatgccggagaggcggagacgtcagcgaggaatgccggcatatcagccagtcaggcagaagagagcgctgcaaatgctgacacttcagcaggggatgcatcggagtcagcccggcaggcggcagaaagtgcagcctcagcaaagcagtcagaggaggcgtcatcgtcctcggcctctgcggccgctcaaaaagccagtgagtcattacaaagtgcaacagatgctgagttgtcaaaaaagacggcagaaagtgcagccggtaatgcagccagggatgcaacgaccgcaacagaaaaagcccgggagtcagcagaaagcgcacagtcagcggaacaaagcaggatagcggcggaagaggccgtaaaccgaatccccaccgtggtggggcctcccgggccaaagggggaaccggggcccgcgggtcctcaggggccgaagggagataaaggagagcgtggcgacaccggcccggcagggcaaccggtgaacgggggccggcaggtgatgctggtccggcaggcccgcaggggccgaaaggcgacaggggagagaccggtctgacgggaaatgcaggtcctcagggacctaaaggggatgcgggagctgcaggcccggcaggaccacggggaccgaaaggggatacgggagctgcagggccggcaggtcctcagggaccgaaaggggatacgggagctgcaggcccggcaggmccacagggaccgaaaggggatacgggagctgcaggcccggcaggaccacggggaccatccggaagccctgacagcgggctgtttggtgtcggttcttttgttcttgcggcgtattaccagacgcattattcgggggaccgtgcccctggctcaactgttgccgggtcatcactgtctgcatgctgcctttcgaatggtactcccctggttgcttccggtaatgtgggggagacccgtttaccgggcacgtggcgtgcatgtggtccgatgctatggacatcatctccgggtatcagacaggcaggattatttcagcgcatatcatagaggaggtcatggtggataagggaaaagagattcttgcagtacgaaatgcagccagcaacgaatatggcgggataaactgtgaggtgcagtttgaagacgcggtgaatgaaaaaggggaacaggtatggctgccgtatactgcaacggaaacggataatacagaacacggaaaagcattgtggtctgggctgacagcaggaacgtacggaagtgtgagtgcctttgtcgccacggaagcagtactggaagcggcaaaagcggcgaaaagggaagagattaatatctggcgtgatgtgcaggagaatatggaatacatgatggaattcaacggaaggaactgggattacggcaagaagacgttgtccaggataagcatgacacgcctgatggcagagaataaccgtcttccggaaggttttgcctggaccgacggggataataatgtggtgccggtgacggcggcagacatcatagccctgtcggatgcgacagagcaggcgatgtttgcgaagggggtggagattaatacacggcagttgcagatgaaagcagaggttgaggcgctgacagagctgaaggcgatccgcagttatgctgtcggatggcctgctggctgaataaaaaaaacgggaccacgaccagtcccggaaccatgagttttagggtattagtttgttatcatagttagcgtgctaactatgccatatcaggctgattagtgaagtgatgttgttcgcatttttgcacggcggagaatattcagattttgggaaatccatatttttcccgtgcgcggttacatgcttcattcgcgatgccattttctccggacattgcgaattccctgcatgtggacggacgkttktaaacagagcaatatgcgttttc

SEQ ID NO: 137 - DNA, 61513 bp, Escherichia coli
  modified_base (19353)..(19353): a, c, t, g, unknown or other
  modified_base (19360)..(19360): a, c, t, g, unknown or other
  modified_base (19367)..(19370): a, c, t, g, unknown or other
  modified_base (19374)..(19374): a, c, t, g, unknown or other
  modified_base (19377)..(19380): a, c, t, g, unknown or other
  modified_base (19390)..(19390): a, c, t, g, unknown or other
  modified_base (61392)..(61392): a, c, t, g, unknown or other
catttagctaaccccttwtcttatttggcggaagcgcagagattcgaactctggaacctttcgggtcgccggttttcaagaccggtgccttcaaccgctcggccacacttccggaatgacgcgcactataaacatcccgatgcggcgtgtaaacccctaatttgtttgtttgcctgaaaaacagccaaaagtgcattgatagcgtgaaataacagcagattgatcatttcatcaccatgaattccttctcttttactcgtttagcaaccggctaaacatccccaccgcccggcaaaaagaaaaataggtccatttttatcgctaaaagataaatccacacagtttgtattgttttgtgcaaaagtttcactacgctttattaacaatactttctggcgacgtgtgccagtgcagaaggatgagctttcgttttcagcatctcacgtgaagcgatggtttgccttgctacagggacgtcgcttgccgaccataagcgcccggtgtcctgccggtgttgctaggagaagagacgtgcgatatgaataacgaggaaacattttaccaggccatgcggcgtcagggcgttacccggcgcagctttctcaaatattgtagtctggctgccacgtcgctgggattaggcgcgggaatggcaccaaagattgcctgggcgctggagaacaaaccccgcattccggtggtatggatccacggtctggaatgcacctgctgtaccgaatcttttatccgctccgctcacccactggcgaaggacgtcatcctttccctgatttccctcgattatgacgatactttgatggctgccgccggaacccaggcggaagaagtcttcgaagacatcatcacgcaatacaatggcaaatatatcctcgcagtagaaggtaatccgccgctgggcgagcaggggatgttctgtatcagcagcggtcgaccgtttattgagaaactcaaacgtgccgctgccggagccagcgcgattatcgcctggggaacctgcgcgtcctggggctgcgtgcaggccgcgcggcccaatccgacgcaggcaacgcctatcgacaaagtcatcaccgacaaacccattatcaaagtacctggctgccctccgatcccggatgtgatgagcgccatcattacttacatggtgacctttgatcgcttgccagatgtcgacagaatgggccgtccgctgatgttctatggtcagcgaatccacgataaatgctatcgccgcgcccacttcgacgccggagagttcgtccagagttgggatgatgacgctgcccgcaaaggttactgcctgtacaaaatgggctgcaaagggcctaccacctataacgcctgttcctccacacgctggaatgatggcgtttcttttccaatccagtctggtcacggctgcctgggctgtgcggaaaatggtttctgggatcgcggttcgttctacagccgcgtggtcgatattccgcaaatgggtactcattccactgccgataccgtcggtttaaccgcgcttggcgtggtggcagcggctgttggtgtgcacgcagtcgccagcgccgttgaccagcgcagacgtcataaccagcaacctacagaaaccgaacatcagccaggcaatgaggataaacaggcatgagcactcagtacgaaactcagggatacaccatcaataatgccggacgccgcctggtggtcgacccgattacgcgcatcgaaggccacatgcgctgcgaagtgaatattaacgatcagaatgtgatcaccaatgccgtctcctgcggcaccatgtttcgcgggctggagatcattctgcaagggcgcgacccgcgcgatgcgtgggcgttcgttgaacgtatctgcggcgtctgtactggcgtacacgccctggcttcggtttacgccatcgaagatgctatcggtattaaagtgccggacaacgccaatatcatccgcaacattatgctggcaacgctctggtgccacgatcatctggtgcacttctatcagcttgccgggatggactggatcgatgtgttagatgcgctgaaagccgacccgcggaaaacctccgaactggcgcaaagtctctcctcttggccgaaatcatccccgggctatttcttcgacgtacaaaaccgcctgaaaaaattcgttgaaggcgggcagttggggatcttccgcaatggctactgggggcacccgcagtacaagttgccgccagaagccaacctgatgggctttgcccactacctcgaagctctcgatttccagcgtgaaattgtgaaaatccacgcggtctttggcggtaaaaacccgcatccaaactggattgtcggcgggatgccttgcgccatcaacattgacgaaagcggcgcggtcggggcagtcaatatggaacgcctgaacctggtgcagtcaattatcacccgcacggcggacttcattaacaacgtgatgatccccgacgccttagccatcggtcagttcaacaaaccgtggagcgaaatcggcactggtctttctgataaatgcgttctcagctacggcgcattcccggatattgccaacgactttggcgagaaaagtctgctgatgcctggcggcgcggtgattaacggcgacttcaacaatgtgctgccagtggatttggttgatccgcagcaggtgcaggagtttgtcgaccacgcctggtatcgatatcccaacgatcaggtcgggcgtcatccgttcgatggcatcaccgacccgtggtacaaccccggcgatgtcaaaggcagcgataccaacattcagcagctgaatgaacaggaacgctactcgtggatcaaagcgccacgctggcgcggtaacgcgatggaagtggggccgctggcgcgcacgttaatcgcttatcacaaaggcgatgctgcgaccgttgagtcggtcgatcgcatgatgtcggcgttgaacctgccgctttccggtatccagtcaacgttaggccgcattttgtgccgcgcgcacgaagcgcagtgggccgcaggtaagttgcagtatttcttcgacaagctgatgaccaacctgaaaaacggcaatctcgccactgcttccacggaaaaatgggaacctgcaacctggccgacagagtgccgtggtgtcggttttaccgaagcgccgcgcggggcgttaggccactgggccgccattcgcgatggcaagattgatctctaccagtgcgtggtgccgaccacctggaacgccagcccgcgcgatcccaaagggcagattggcgcttatgaagcggcgctgatgaacaccaaaatggcgatccccgagcaaccgctggagatcctgcgtactctgcacagctttgacccgtgcctcgcctgttcaacacacgtgctgggcgacgacggtagcgagctgatctccgtgcaggtgcgttaacagcgaaggagaatcatcatgcaacagaaaagcgacaacgttgtcagccactatgtctttgaagcgccagtccgcatctggcactggttgacggtgttatgcatggcggtgttgatggtcaccggatactttatcggcaagccgctaccttccgtcagcggcgaggcgacgtatctgttctatatgggctacatcaggttaattcacttcagcgccgggatggtttttaccgtggttttgctgatgcggatctactgggcttttgttggcaatcgatactcccgcgagctgtttatcgtgccggtatggcgtaaaagctggtggcagggcgtgtggtatgaaatccgctggtatctgtttctggcaaaacgtccgagtgccgatataggccataatcccatcgcccaggcggcgatgttcggctatttcctgatgtcggtctttatgatcatcactggttttgcgctgtacagcgaacacagccagtacgctatttttgcgccgttccgttatgtggtggaatttttctactggacgggtggcaactcaatggacattcacagctggcatcggctggggatgtggctgattggcgcgtttgtgatcggtcatgtctacatggcgctgcgtgaagacatcatgtccgacgacacggtgatctccaccatggtcaacggctaccgtagccacaaatttggcaaaataagtaacaaggagcgttcatgagcgagcaacgcgtggtggtcatggggctgggcaacctgctgtgggccgatgaaggcttcggcgtgcgggtggcggaacggctgtatgcccattaccactggcccgagtatgtggagattgtcgatggcggtactcagggactgaacttgctggggtatgtcgaaagcgccagccatctgttgattctcgatgccattgactacgggctggaacctggaacgctgcgaacctatgccggagaacgcattccggcttatctcagcgcgaagaaaatgagcctgcatcagaacagtttctccgaagtgctggcgctggcagatatccgcggacatctgccagcacatattgccctcgtcggtctgcaacccgctatgctcgacgactacggcggcagcctgagcgaactggcacgggatcaactgcccgctgcggaactatcggcgttggcgcaactggctgcgtggggaattgtgccgcaaccggctaatgaatcgcgctgtctcaattatgactgtctgtcgatggaaaattacgaaggcgttcgtttgcgccagtacaggatgacactggaggagcagggatgagcaacgacacgccatttgatgcgttgtggcaacgaatgctggcgcgcggctggacgccggtcagtgaatcccgtcttgacgactggcttacgcaagcgccagacggcgtggtgttattaagcagtgacccgaaacgtacgccagaggtcagcgataatccggtaatgattggcgaattactgcgcgagtttcccgactatacatggcaggtggcgattgctgaccttgagcagagcgaagccatcggcgatcgctttggcgtctttcgctttcccgccacattagtgtttaccggcggaaactatcgcggtgtgctgaatggtattcacccgtgggcggaactgataaacctgatgcgcgggcttgtcgaaccgcagcaggagcgtgcctcatgagcgaaactttttccatctgctggggccaggaacgcaaccgaacgatgacagtttcagcatgaatccactgccgatcacctgtcaggtgaatgatgaaccgagtatggcggccctggaacaatgtgctcacagcccgcaggtgattgcgctgttaaacgagttacaacatcaaatgagtcaacgccagccgccgttgggcgaggtgctggcagtcgatctgttaaatctccacgccgacgatcgtcactttatcaatacccttctcggggaaggggaagtgtcagtgcgcattcagcaggctgacgacagtgaaagtgaaatacaggaggcgatcttctgcggattatggcgggtgcgcagacgtcgcggcgaaaagttgctggaggacaaactggaagctggctgtgcgccgctggcgttgtggcaggcggcaacgcaaaatctcttgccgacagattcgctgttaccgccgcccattgatggcctgatgaatggcctaccgttggcgcatgagttactggcacatgtacgtaaccccgacgcgcagccgcacagcattaatctgacgcaattacccatcagcgaggctgatcggctttttctctcacgtctctgtgggccgggaaatattcagattcgtaccattggctatggcgagagctatatcaacgccacggggttacgccatgtctggcatttacgctgtacggacaccttaaaaggccctttactggaaagttatgaaatctgcccgataccggaagtggtgctggcagcgccagaagatttggtcgactctgcgcagcggcttagcgaggtatgtcagtggctggcggaagctgcaccgacgtaaaaagacggtaagtatcgctttcagtcttatgaatatcgcaatcggcgaatacctctggtcgtagagtttcaggataaagagggagatctaccattatcgggttatttttctctcttcgcctacaggagtgcgcatgtgggatgtcattgatttatcgcgctggcagtttgctctgaccgcgctgtatcactttttatttgtaccccttaccctgggctgatttttttgctggctatcatggaaaccatttacgtggtcaccggcaaaacaatctaccgcgatatgacgcgcttctggggtaagctcttcggtatcaattttgctcttggcgtggctaccggcctgaccatggagtttcagtttggtactaactggtcattctattccaactatgtgggcgatatttttggcgcaccactggcgatggaagcattaatggccttcttcctcgaatccacctttgtcgggctgttcttcttcggctggcaacggctgaataaataccagcacctgctggtgacgtggctggtggcgttcggttcaaatctctctgcgttgtggatattgaatgccaacggttggatgcaatacccgaccggtgcgcattttgatatcgacaccctgcgtatggagatgaccagcttcagcgagctggtctttaacccggtcagccaggtgaaatttgtgcacaccgtaatggcgggctacgtgaccggggccatgtttattatggcgatcagcgcctggtatttactgcgcggacgggagcgcgatgtcgcattacgttcgtttgccatcggttccgtcttcggtactctggcgattatcggtaccctgcaactcggagacagttctgcgtatgaagtcgcgcaagtacaaccggtaaaactggcggcgatggaaggggagtggcaaacggaacctgcacctgcaccgttccatgtggttgcctggccggaacaggatcaagagcgtaacgcctttgccatcaaaattcccgcgctgctagggatcctcgccactcactcattagataaacccgtgccgggtctgaagaatttgatggctgaaacctacccacgcttgcaacgcggacgtatggcctggctgttaatgcaggaaatatcgcaaggcaatcgtgagccgcatgtgttgcaggcattccgggaactggaaggtgacctgggctacggcatgttgctctcccgctatgcgccggatatgaatcatgtcacagccgcacagtaccaggcggcgatgcgtggcgcgatacctcaggttgcgccggtattctggagtttccgcatcatggtgggctgtggttccctgctgctactggtgatgctgattgcgcttgtccagacgctgcgtggcaaaatcgaccagcatcgctgggtgctgaaaatggcgctctggagtttgccgttgccgtggattgcgattgaagccgggtggtttatgaccgagtttggtcgtcagccgtgggcgatacaggacatcttaccgacatactccgcgcactccgctttaaccacaggacaactggctttctcactgatcatgatcgtagggctttacaccctgttcttaatcgccgaagtctacctgatgcagaaatatgcccgtctggggccgagcgcgatgcagagtgaacaaccgacgcagcaacaggggtaaaggagaaaatcatgtttgattatgaaacattgcgcttcatctggtggctgctgattggcgtgatcctggtggtctttatgatctccgacggatttgacatggggatcggctgtctgctgccgctggtggcgcgtaatgatgatgaacgccggatagtgataaacagcgttggtgcacactgggaaggcaaccaggtctggttgatcctcgctggtggggcattatttgccgcctggcccagagtgtatgcagcggcgttttccggcttttatgtggcgatgatcctggtgctgtgctcgctgttcttccgtccgctggcctttgattatcgcggaaaaattgccgatgcacgctggcgtaaaatgtgggatgccggtctggtcatcggcagtctggtgccgccggtagtcttcggtatcgccttcggcaacttgttgctcggcgtgccgtttgccttcacaccgcaattacgcgtggagtatctcggcagcttctggcaactgctgacgccattccctttattgtgcggattgctcagccttgggatggtgattttgcaaggtggcgtctggttacaactgaaaactgttggtgtgattcatctgcgttcacagctggccaccaaacgcgctgcactgttggtgatgctgtgctttttgctggcgggttactggctgtgggtcggtattgatggctttgtactgctcgcccaggatgctaacggtccttccaatccgttaatgaaactggtggcagtgctacctggtgcctggatgaataatttcgtcgaatcgcccgttttgtggatcttcccgctgctggggttcttctgcccattgctgacggtgatggcgatttatcgtggtcgcccgggttggggatttttaatggcgtcattgatgcaatttggcgtgattttcacggcaggcatcacgctgttcccctttgtcatgccgtcaagcgtgagtccaatctccagcctgacgttgtgggacagcacttccagtcagctgacgctgagcattatgttggtaatcgtgctgatatttttgcccattgtgttgctctacactctctggagctactacaaaatgtggggacgcatgacaacagaaactctccgccgtaacgaaaacgagttgtactaaggagcaggaacaatgtggtatttactttggttcgtcggcattttgttgatgtgttcgctctccacccttgtgttggtatggctggacccgcgtctgaaaagttaacgaacgtaggcctgatgcggcgcattagcatcgcatcaggcaatcaataatgtcagatatgaaaagcggaaacatatcgatgaaagcgatcttaatcccatttttatctcttctgattccgttaaccccgcaatctgcattcgctcagagtgagccggagctgaagctggaaagtgtggtgattgtcagtcgtcatggtgtgcgtgctccaaccaaggccacgcaactgatgcaggatgtcaccccagacgcatggccaacctggccggtaaaactgggttggctgacaccgcgcggtggtgagctaatcgcctatctcggacattaccaacgccagcgtctggtagccgacggattgctggcgaaaaagggctgcccgcagtctggtcaggtcgcgattattgctgatgtcgacgagcgtacccgtaaaacaggcgaagccttcgccgccgggctggcacctgactgtgcaataaccgtacatacccaggcagatacgtccagtcccgatccgttatttaatcctctaaaaactggcgtttgccaactggataatgcgaacgtgactgacgcgatcctcagcagggcaggagggtcaattgctgactttaccgggcatcggcaaacggcgtttcgcgaactggaacgggtgcttaattttccgcaatcaaacttgtgccttaaacgtgagaaacaggacgaaagctgttcattaacgcaggcattaccatcggaactcaaggtgagcgccgacaatgtctcattaaccggtgcggtaagcctcgcatcaatgctgacggagatatttctcctgcaacaagcacagggaatgccggagccggggtggggaaggatcaccgattcacaccagtggaacaccttgctaagtttgcataacgcgcaattttatttgctacaacgcacgccagaggttgcccgcagccgcgccaccccgttattggatttgatcatggcagcgttgacgccccatccaccgcaaaaacaggcgtatggtgtgacattacccacttcagtactgtttattgccggacacgatactaatctggcaaatctcggcggcgcactggagctcaactggacgcttcccggtcagccggataacacgccgccaggtggtgaactggtgtttgaacgctggcgtcggctaagcgataacagccagtggattcaggtttcgctggtcttccagactttacagcagatgcgtgataaaacgccgctgtcattaaatacgccgcccggagaggtgaaactgaccctggcaggatgtgaagagcgaaatgcgcagggcatgtgttcgttggcaggttttacgcaaatcgtgaatgaagcacgcataccggcgtgcagtttgtaatgcataaaaagagcattcagttacctgaatgctctgaggctgatgacaaacgaagaactgtctaatgcgtagaccggaaaaggcgttcacgccgcatccggccactttcagttttactctttctcggagtaactataaccgtaatagttatagccgtaactgtaagcggtgctggcgcgtttaatcacaccattgaggatagcgcctttaatattgacgcctgcctgttccagacgctgcattgacaaactcacctctttggcggtgttcaagccaaaacgcgcaaccagcaggctggtgccaacagaacgccccacgaccgcggcatcactcaccgccagcatcggcggcgtatcgacaatcaccagatcgtaatggtcgttcgcccattccagtaattgacgcatccgatcgcgcatcagcagttcagacgggttaggtggcacctgaccgcgagtaatcacatcaaagcctcctttgccaaaatgctggatcactttgttgagctcatctttacctgccagatattccgacaagccatgttcattactcacggtaaacaggttatgcgaataaccacggcgtaagtcggcatcaataaataacactttttgatcggactgggcgatcaccgctgccagagttgaactgacaaacgttttaccactgtctggcgtcgcaccggtgatcatcagaatgttattctccgtctccatcatagcgaaatgcagactggttcgtagcgcacgtacggcttccacagcagaatccgccgggttatccaccgccaggaaggggatatttttagtacgatggcgctgctgattagaaaataaatttttcttacgcagacgggtgcgtttatccagccactcggacattgggatagtggcataaacgctgatgccgtgctcttccagttgttccggggcttctacaccacgacgcaacatcgcacgcgccagcacggcacccacagaaataaacaggccaagaataaaaccaagcaccacattcaacgcttttttcggtttcactggctgcggctgagtgactgccgggtcgataatccgcacgttaccaatggcactggatttcgaaatactcaactcctgctggcggttaagtaattgcagatataccgcacggcccgcttctacgtcacgacttaaacgcaacacttcctgttgggtggaaggcattgccgatacccgcttattcaggcgtttgcgttcttgctccagcgtctggcgtttttccagcagcgcacgataagttgggtgatctttcttatacagctgggagatctctgcctcgcggaaggtcagctcattgagttgattatcaacgttcacaatctgctcaagaacggctttggcttccaggttaaggtcaaccgaatcgcgctgctggcgataaacgttgagtttttcttccgcctggtccagctcgctgcgcacttcaggtaactggcgctgtaagaattcaaggctttgtgaatcctgcgccgcctggcgagcgatattctgttgcaaatagttgttagcgatgctgttcagaatacgagtaatcaactggggatcatcaccagtcatggtaagttccagcatcccgctttctttactgcgttcgctaacggtaaaggtttcctgcaatgcgttaatcgcttccagttcggtacgctggctcaggacaaactgtgttcctggtttggccttaatgtccgcgatagtcagcgcaacgccatctttttccagacgctggccgaccataccattgacggtgaactcttcaccttccagtgtatagtggccgttttccccaaccgtgagtgtcagttgctgatcctgaccattcagttgtggaatatgcatccagctgatcgccagctcacctggtttttctttggttaatctcgcccagccgcgacccacaatcggaaaatacttctgctcaactatgtcgcgcagattcagttcagcaatggttttaccgagaatcatgcgcgattgcagcagttggatctccggtgcagactcgggcgatgagttagggatcatatcgctcaggccgctgagaatggcgttgccctgtttttgctcaacctggaccagagtatctgcctgataaattggtgtacttaacagcgagtaagcgacagcgatcagcgtgaataacgcggtcacgctgataataaacttacggtgatcccataactcgccgaccagacgaagcagatcgatctcattttcctgagtgctgcctggtggcgtattcatatttttagttgtcatcgtattttataaactcaaattaccggctgaggcgcttcgcccattcctgactggcgcgctccaacataccgtagacatgttcaaatgcgtcctgacttttacgatagggatccgggatctctttctgttccagccattgcccaaacagcattgtcttcccgcggacctcgggagcaattgcggtaacctgagcaatatgttccgactccattgccagaatcagatcgtaatttcgtgccatctcagcagtgagcttacgtccggcatgtccttcaagagatacgccatgattagcggcaacatctgccgctgtcgcatctgcagggtgttttaccagaccatgaacacctgccgatttgacttttacgcccggcagacgtttacgcagcaagcgctcgccaatgggcgaacggcaaatgttgccggtacaaaccaccaggattgagttaaattttagttgggccatgtttgaatccaccgtgaagtctctgtcaggtcatgcaccccggaaatcgtcggtaccagcagagaaatcacacggttccaacgagccagcggcgcggtagtgacataaacaatgtcgtaaggttcaagctggaattccgttccgagtatcattgccgatgcgtccttcgcattcagctgataaatattggcgattttgccattctgcttgttttgcgttgcacgaataacaaaaatccccgtcgcatcagcgacatcctgattcataccctcagcgttacccagcgcttccgccagggtcataccgctgcggtccattttcagcgtgctctgtttacccacttcacccatcacgaagactttcagatcatcgttgcgcggaataaataaaatatcgcccgggtgcagcagtttgttctggcgcaagtcgccacgctgcatcagcgcatagaggttcactttggtctttacgccattctgggtgagcaccacgttgcgccagtctgcatctgcggtcagaccgcccgcggcgttaatcgcatccatgatggtcagaggaatattggtaatcggctgctgacccgatttgctgacttcgccggtgacgtacgctttttgcgatcggaacgccgcgacgctgacatcgacttgcgggctttcaatgactgaatcgagacgcgctgtaatctcgttgcgtacctgggtaagtgttttcccggccactttcaggcgaccaatataggggtagaaaatcgcaccatcggcgttaacccagttgccggtatcactggcgctacggtattgcctgcgggggtggttagttccgggtgatcccagaccgtaaccatcaacacatccccaatgccgatacgatattcatagtttgcgatttgctgctccagctccgggttagcctgcgacataatcggtttggcgcgcaactgatcaatcaatcctggcgtgacgggatagatattgaccattttgtccaggtcatactgattgtcaggtagttcaatgacatccttgttactggtcgataaattctgaccaggaacaagggtacatgctgtcaaagacagaacagccaatgtcagtaccgaaaacttaaaaatgttctttttcattggtttatatttatcagtcaatgtaatgttatgaattacgtcaggttattgtccaaccggtacttctcgctctgccgtcattggatagagctggtatttgcgtgacagcatttgtccaccatcacgcgtcaatggtgtccacgaaaccaccgcgcggttgcggttaggtccaatggtcatcaagtcgaatggaatcgagatataaaaacctttactaaagccgccttcgccgtagtcatctttagatacgttactgattgccgcccatacccctaccgccacgccgctgtcaaagcgtttggcgacgtcgatcgttgcgcctttatcttttgccagatattgcccaacgctaagtttcatcagtacgccattgggcgtcggcgggttccagtaagccgtcacgaaacctgttggcgtggaataatcggtgaaacgcatcatgttgtcccagtcacgctgcttcacgtagttaacgtccacacccagcgcccagctggcatctagcgggcgataaagcagctcggaaccgacaccggcatacatcgtttccagataaccgccatacacctggccatagaaaccattgcctaagtcagcaaaatagttcgcctgcaagttgttgagataaacgtcattgcgaacgtagtcacggatatgcgtgcgcacgcggggcagggtagagtccgcgggcaacagcgaagacttaaacttgtcgtagttgttgtaaatattggtgaaaataccgccatcaagcagcaggtggtcggtaaaccagtagcgggcactggacatcagccccagctggaacatatagaaatcttccgggccgcccagcgactgtgaaagtgttgggttgaaagagtagctaaagcgatcttcacgaatacggtagccccgaccaaaggcagaaagatcttctgcttcaacacgttgttgttgaagttgctctgattgaccaggcgctgtaccagccagctgtttgcgcaggctggctacgtcggtttcggtagtcaccatcgccatatgctcgcgcttttgcgtcacgctaatcttctcaacgccttgcggcaggttattcaccagaatccggttggcacgatcgaccgcttcgcgagaatcacggtatttgtattgttgaccagacatatacagcgtcttatcgcgcagctgaatttccggtgcttcaaaacctgcgttgtacttcagcgcggtaagttggttcgctactgtggtgtactgcaatccttcagattcaggcgcaggttgatatgccggttttggcgtatcgcgcagggcagggcgcagatcgttgaaattggtccgtaacgtgaagccaaacatcaacgtgttaccgcgttcataactcaggttgagatctgcccagctggcagcgcgataaactgcgccgacgttgaaatggcttgcctgaggcagtttgccagcgaaatcattctggtaattgttgccatcgtattcgagtttcagacgcaggggattccacggcgtttgatactcaatgccgccaaagatggaagccgggccacgaaagatatcgctaaagctgatatcgcccgcatcgtgagactctgcgcgatgacaatatttatcgctcacccggcaaaacgggttggtaatattgcccgcattaccggcgtagccccatgccatcccgagggtgaaatcaaatggccccgcttgcttgctggccaccagatactcaccgtcaaacagacccgtaccagcaatatcacgtttaccaaacgccacttgcggtagccagtaaccttcttcccacaggcgaagtttaaaatcgaatgatttgtctttgtatgactgatcgccgctgaaatcttcccactggctatatttgcgtgtgcgcacatccgtataacgaatggtgccttccagccatgggaacagcgccacggaggtggagtagaaccggtattgatcgttatcccggtagttgacgctgaattcaccttccggtgcgatgcgcgcatttggcatctgcaacaatcctgtgccgccaaagtctgattgcgacgaacccagcggatccgggtaggttaatacttcagcatgacaggcactggagacggcaatggccaggcagcttaaaagataagaattcttcttcatcagtcaggaacacgttgcgttaaaacagacacaatctggtcatttaaatcagcatatttttcgggcagtacatgcgcagaaaagcccaaccaaagctggctgccaggcggtggttccacatgtcttttattccacagggcaacaggggcgacgacagtctcaccctcaggcgtaatcaccataacgttattcttgtccgcgcctgcaaggcgggggtgatcttgcagataatcggtaacgctacggcctgcctgccagggcaattgcccggccccagaaaccgcacccagcagagtaatagtcaccggacgctgtacggtatagagcgtatagtccccgaccaacgggggattgctgttctcatccaatcgtacaaaatcagggtccagtttgaccggtaagcgaccagtgatattgagattgagtaactgctggcgcacggatttaatcgttgccgccacatcgtcgtcagcttctgcttcccaggaagcaagctgtgccatgacatgttggtagtctttaagcgctttagctttcgccgcagagtcggtcagcaaggcaccaggccaccagaggcgatcgcgcagttgcggttgtgtcaccaactggacaacattttccatggggccaacggaaagtgtctgttgttcgccaggcagataaatagtcaccgttccttgcgcaaaggcatggggtgtcattacgtaaagtacgctggcaatgaaatacgactgtaatttattcatggtgcgggtttaagaaacgtcatttctacgggaataacccctgcgcctaacatttgccgactttgacgaacctggccagtagccgaatcgacccagaatgtgttttgccactgtttttctggccgcgtggaagtcacctcttcctgccagacattacacagcacattgcgacccgcaatattcagcgtctctaatccagcaaaggaaaaagtagaactcagggtcgcagagcgaaaatggttgtcttcactccagagaatatcgcgcgtccagcggctgccatcttttattgccagcgcgttacgcagagggtcctgcccggaatttatcacttccagcagattattattaagtttgacggtttttaaaagacgtccattgtgggtaaccagcatggcgttatcctgggataaccatttgctttgttcttgttctatatatcccagtaccacaaagattcgttgcccttcattaaggcgtaaatacatcgtggaataaggcaacgcctggatctgctgatccgctacggtgatatcctgattatcgaaaaggctggcgcgaaatgtatcgaccatactttgctggctgtgcgtacatcccgcaagaaatagtgcgaaaatcgataaaataagagggcgcacctttaatccttgaaaggttaattaaaaaaatgcaaatctctaaagcccggtacgaatatcgcaaccgggtatcatttaactttaatttcgacgcgttaaagcagtattagcgtgtagtggacgtggtggttgaggtgttatgagaaccgccatcgccactgtcatttgctgcaacaactgccaacgtcgccacaccaacagccgttgccacaccgacaactgtcgccgtgccgacagcgccagcagccacgccaccagtggtagtagcagtcgtggttgcgccggtagtggtcgttgtggtgccagtagtacccgtcgttgcctcggtcccgtttgttgcttcaggggcagcaaacgcagctggcgtcgtcaacatgaaggccataaggattgcagaaagcttgtgtttcataacttttcctttattcatcgcatggacaatacgtacgcttgagatcaggattgtctactttgagtataacatccttgtgaaatctccctttcctcataccgcttgcactatatactgcgggtaggaaaggcgcgcagagggaaatataagattgttaactatccccctctggaaatacgacttgtgagcataagataaatcttagcaaaatacaaattaaagataaggaaattgttacgaaagctattaattattgttggtaatatagtttcaagtggtactataactggctgttaaatggcatttataactattaggtgcagagatattcgcttaaatggattagtttctttgtggaaaagtaaccgatgttataatgtatgatgttgactattgcactattccaataaaaccagtcagctttaaacaagcagcgtcatattaagagagataaacatttgccgctgttggtcctcgcaggccatttacgcggcaaaattccacacgtaatcctggtataagcacttctgcgtcgcggggagtgaatgcagaaatatggacctgaacttctttacgaccgtcggaggggataatgaatcctttgccgcttttgcgatcaaaggttttgacaattcctgtcattttacgggacaaacaaattccttactgaaaatactgcgctgcactatacggggttaataaaatgactccaacttattgatagtgttttatgttcagataatgcccgatgactttgtcatgcagctccaccgattttgagaacgacagcgacttccgtcccagccgtgccaggtgctgcctcagattcaggttatgccgctcaattcgctgcgtatatcgcttgctgattacgtgcagctttcccttcaggcgggattcatacagcggccagccatccgtcatccatatcaccacgtcaaagggtgacagcaggctcataagacgccccagcgtcgccatagtgcgttcaccgaatacgtgcgcaacaaccgtcttccggagcctgtcatacgcgtaaaacagccagcgctggcgcgatttagccccgacrtagccccactgttcgtccatttcagcgcagacaatcacatcactgcccggttgtatgcgcgaggttaccgactgcggcctgagttttttaagtgacgtaaaaccgtgttgaggccaacgcccataatgcgggcagttgccnggcatcnaacgccnnnnatgnccnnnncaatgatttnctggtgcgtaccgggttgagaagcggtgtaagtgaactgcagttgccatgttttacggcagtgagagcagagatagcgctgatgtccggcggtgcttttgccgttacgcaccaccccgtcagtagctgaacaggagggacagctgatagaaacagaagccactggagcacctcaaaaacaccatcatacactaaatcagtaagttggcagcatcactatacggggttaataaaataaagccagcgatatttaagaccgccggacggctaaaataaaatttgcttaatctcaattatcatgccttaatagctgcgtcggtttgaaagacagacagcatacaaagtagtttactaaagcagttctcattatcaggcattatccccttcttttgagtctctctcctgaacactaagtagtttctgtattaaagccctgtttgccgaaaggcccaaaatgaaggaagtaaaatatgtctaataaaatgactggtttagtaaaatggtttaacgcagataaaggttttggctttatcactcctgatgatggcagcaaagacgttttcgtccatttcaccgccatccagagcaatgaattccgcacgctgaacgaaaatcagaaagttgaattttctattgagcaggggcaacgtggccccgcggcagcgaacgttgttacgctctaaggttgccgttattactcaacatctccatttccgctgtccatgttgtcatggttcacagtaccgtacatcggcattcgatgtgacggagcgaaaccctttgggcgctaagtgtattttttgtaaatcgacgatgatcacctttgataacgtcgcgctgcaaatacgcactgaccatgcgccgctggatttcacaaaataatatcaggctccctcgtggagccttttttatatctgccttatttttcttcaacgctgtatgtatagtaagcgataacctgttgattattgaatctttcggggagatggcttataacatttcttacctgaccagggtaccgggaaccaacaccttactggcgtgttgctgtctttcaagaccagacgaggttaacagtgaatattgaagagttaaaaaaacaagccgaaacggaaatcgctgactttatcgcgcaaaaaatcgccgagctgaacaagaatacagggaaagaagtctctgaaattcgcttcaccgcacgagaaaaaatgaccgggcttgaaagttatgatgtcaaaatcaaaataatgtgattttgtgaacatcaccccgtgcgaggtgatgttccgcttgttgctaatttagtgaccaatcattggcgcttgtggaattaagcgtcggtacaattcctccggcaccgggctttgccatactcccgcatacattgcgtaaccaatcaccgcgaacataatccccataaccagtagcgtcattaaccagccagacaacgcaaaagcttttttatttgccgcaggtttttgcagtgaaaaggtcaatgttgaggctaccggacatgactctacgcaagtcatacagccggtacattccactgttcgtacctgaattaatttatctaccgggatccgtgatgggcaattttttgcgcatttgccacagtcgatacaactttcggcattgcgacgaatcttaaacggcgacaatagcgaaaccacgcccatcagcgcgccatatgggcaaagataacgacaccaggcatggcgaataaacaggctggcaatcagcaaaacggtcacgctgattaatgtcgcggtccccatatgacgaaagaaatcgagcatttttacgtccatcaccacgctgtagggcgacaacataaaatagtgaatcgcctgagcgggcatcaataacgcgatatagagaaaaaaactcaacagcaaatacttcacgccgcgcagaggaatatccagccagcggggaaggacacattgccgaccaaacagtttgttaccgagatcgccgattaattcagaaagcgtaccaaccgggcataaccatgagcaaaaggcctttttgagtaatagactgatgacgataaaagcgaccaataacagcatcgcggcggcgtggacggacggtaactgacctgttgtaaggctatatttcagattcatcagaccggcaatcggtagccagccttcgatacctcccggtctggcgacaaatgtcgtgctacttgccgtttcgtaatagcgcacccaataccagaacgtgatggcaatataaatattaattgccaacagtaataattgcgtcgctttacgccaggtcgtggcattgcgccagtcattccacggtaatttgccgcccgtcgtgcctggccgccgctgccagcgggttctttttttctctgccatgattttgccagtccgttaagttgcatacaaaatgccactattctagttgttcttaacaggctgatattgattcaaatcgcgttcaggtctttcttatgcaaccatgcttccagagcggcaacactgcgtgtaatttcttcgtgtggaaggggggcagataatggctgctgctccagttgtgcgcatagctggctggcgatacgcattcccaaactcgagcaactgctttttagctgatgcgcggcacgctttattttctcgctatcctgactggcgcgggcaatgtcgatttcatcgagaagcggcagggcatgttgtgtaaataataccagccattcgtggatcttctccgtccccattaactgagcatcttcattgagttgcgatacatccagcgattgatcgttattgacttgcagttggagatagtgcgccagtaactgaccgagcacttcacgcggcaccggtttagggataatcccgcggaataatgaactggtacgctggcgcagcgtttcgtcaatgacatgggcgctaaagccaatcaaaaccagcgacggatattgctgtgccagttgtcgggcaagcgtaatgccgtcgacatccggcagatcaaaatccaccagtgaggcagcaaacggttcgctattttgcagagtctctaaagcctgcgcggcattgccaacagcaacaacctgcgcaccactggtgttcagcatctcaacggtaattcgctgggttagcgggttatcttcaattaacagcaaacgtaaaccgtcaagacgcatcgcctgattgactgtttttggcacgggtgccgtggcaacacgtaacggcaagcgtaaacaaaaacagcttccaacctccggcgtgctggtggcgctcagttcgccgcccatcgcctgggccagacggctactgatagtcagtcccagcccggtgccgccgcgtttgccgcttacctgcacaaatggctggaagatttctgccagtttcgcgggatcaataccgcagccgctgtcttccacttcgaccagccattgctcgccatcagtgcgactacgcaggataatgtacccttcgtcagtaaaacgcagggcgttgctcaacaggttggttataacctgacgaatacgtcgcggatcgcccattaacgcgctcggtacatcatcggcaattgccgttgccaggcgaatcgggcgacctttcacccgtccgctcattaattgcagggtactttccagcagcgggcgcggttcaaagggctcatcgctgaccgaaacattcttgccacctgcttcgatagcggaataatcgagaatatcgttgaggatggtcagcaacgattcaccagagtcagtaattgcccgcaaatcatcacgctgggcgttaagtgtggggttatctgccagtagctgtgcggtgccgagaataccgtacagcggtgtgcggatctcatggctcatcgccgccagaaacgccgattttgcctggctggctttttctgcttccgcccgtgcctgtcggtgttctatcaccagttcctgcaattcagctgtacgcgctttgacctgcgccgccagctgttcgcggtggcgattcagtgcatgaacattgctgcgaaacgcatccatcagccgcccgatggtatccagctcccgtacgccagcggtttccgggaaaggggagtcaatatcaccgtccagcagccgttgcagcgcctgcgtttgttcggcaagtggacgcgtgactgagcgataaaccacgcgccaaaggatcagaatcagtgcgcaaagtgaaaccatccccagcaataacaggctgtattgcccgcgtgcactggctttttccagatgcgccagtccgtgctgattacgcagctcaatggtgtcgaccagctgactgacttcgctactaaactgcgcgaactgggcgatgttattttgtgcgagagtttgtaggtgattgctgatttcactgtcctgctgatacagcgccagcaaatcgctatattggctaacggtagttaacgttgttgcgacctgcgcacgaacacccggatcttcaatgcgtatttgccgacgttgcagaattttcaccgcattattgagctgcttttccagcgttggtgcatttttctggatctgctccagccccagattcatcaccatttgctgcacccgcagagcgctaaggcgcagttcattcatctggttaacatactcaagatcgatatcaatcagccgatcgagtgcactttcagcagcctgacgctgatcttgttcgatcaaatcgtaaatcccggcctgggtcgctccagcggaagttgtcgcattattcgcctgaccttgcgccaggcgtgcgatctcatcggcggcagcgactatctgctgactgagttgccgttgttgctggcgtagttgcagacgccgccccaccagttccccttgctgacgtaatgaacgggagatctcctgctcctgttgttcaatagcggtggtatcaaaaccttgttcccgtaacgcttgcagcaacgcattaatcttcaggctttgtgcggtgagcattcgcccctgcgcctgccacatcttttcgttatcggcactggtcaggttctgcgcggcgaaaagttcccaggcgctggcttcgctcaactggcgcgccatattcatggtaggaatcaatgcctgagtgttgtctttttccacctggctgataaagcgcaggttgtaccatcccaccagggtactggtcagggttaacagcgccatcagggcaaagcccatccagagtcttcgggtcagggttaaattcacggtcggtgcacttaaggtgaaaaaggttgagtcgcaaagcggaatgcatctagcataaagccttattatttgatgaggctataatgcgcgtactgctatttttacttctttcccttttcatgttgccggcattttcggctgataacctgttgcgctggcatgatgcgcagcatttcacggtgcaagcctctatgccgcttaaagccaaacgcgcatggaaactgtgcgcgctttatcccagcctgaaagattcatactggttatcgttgaactatggtatgcaggaggcagctcgccgctatggtgtggatttaaaagtgctggaggcaggcggctacagccagttggctacccagcaagcacaaatcgaccagtgtaaacagtggggcgcagaggccattttactcggtagtagcacgacctcatttcccgatctgcaaaagcaggtagcaagtctgccggtgatcgaactggtaaatgctattgatgctccccaggtgaaaagccgcgttggtgtaccctggtttcagatgggctatcaacctgggcgatatttggtgcaatgggcgcacggtaaaccactgaacgtgctgttgatgcccggacccgataatgccgggggcagtaaagagatggtcgagggttttcgcgcagccattgccggaagcccggtgcgtattgttgatattgcgcttggtgataacgatattgaaatccagcgtaacctgttgcaggagatgctggaacgccacccagaaatcgacgtcgttgccggaacggccattgcggcagaggcggcaatgggtgaagggcgtaacctgaaaacgccgcttaccgtggtgtcgttttatctttcacatcaggtgtatcgcgggctgaagcggggaagagtgattatggctgccagcgatcaaatggtctggcagggggaactggcagttgagcaggccatcaggcaattacaggggcaatcggtgtctgataatgtcagcccaccgattttagttctgacgccgaaaatgccgaccgagaacatatccgccgctcgctgtcaccagggggatttcgtccggtctatttttatcagcacacatcagcggctaagaaataaccttcaccatgttgcgtcaccagtaaatccgcgctgagtttatgacgtaaacgacgaattaacacatcgacggtgcgcaggtcagggttttccacccgacgcgcagaaagcatacgtagcagacgttcacggctgagaatttcgcccggattcgtcacaaatgccaccaacatttcatactctgcgcgggtcagtttaatcggctcgccatcccgctccagcgtatggcgcgacacattcaggcaataaccggcaaagcgatagcagttgtcctgagtgtgcggttgagcttgtcgcgcgaggtcgattcgccagagcagatttttcacccgtactaccagttcgcgcagttccagcggtttggtgacgtaatcgtctgcgcccatttccagcccaacaatacggtcaatccgatcgctgcgtccggtaaccagaataatccccaccgttgagcgttctcgcagggcgcgggttaacatcaggccattttcatcgggtaagttgatatccagcagaattaaatctaccggctgattctgcataatttcccgcagcccggcaccgctcgctgtaacggaaacggtatacccctcctgagtgaagtaagattgtaatcgcgcctgggtaaccggctcatcttcaacaataacaatgtgatgtggcatcagagggttttactcattctgttcatatctgttcatattctgccgtaagccgttcatcctgaccagtgccgctgttcatatttgctcattaagatcgcttcactaaaccataattttacaggggctattatgcggaaactctggaacgcgctacgccgacccagtgctcgttggtcggtactggcgctggtcgcaattgggattgtgattggcattgcgctgattgtattgccacacgttgggatcaaagtcaccagcacaaccgaattttgtgtcagttgccacagtatgcaaccggtgtatgaagaatataaacagtcggtgcatttccagaacgcctccggcgtgcgagctgaatgccatgactgtcatatcccgccggatattctaggcatggtgaagcgcaaactggaagcgagcaatgatatctaccagacctttattgctcactccattgatacacctgaaaaattcgaagccaaacgcgcggaacttgccgagcgtgaatgggcgcgaatgaaagaaaacaactcggcaacctgccgctcctgccataactacgatgcgatggatcatgcgaagcagcatcctgaagcggcacgtcagatgaaggtggcagcgaaagataatcaatcctgcatcgactgtcataaaggtattgcccaccagttaccggatatgagtagcggcttccgtaagcagttcgatgagctgcgcgccagtgctaatgacagtggtgacacgctgtactctattgatattaagccaatttatgcggcgaaaggcgataaagaagcctctggttctctgctgcctgcttcggaagtgaaagtccttaaacgtgacggcgactggctgcaaattgaaattaccggctggacggaaagcgccggacgtcagcgtgtactcacccaattcccaggtaaacgcatctttgttgcctcgattcgtggtgatgtgcagcagcaggtaaaaacgctggagaaaaccaccgttgccgacaccaataccgagtggagcaagttgcaggccactgcgtggatgaagaaaggcgacatggtgaacgatatcaaaccgatctgggcttatgcggattcgttgtacaacggcacctgtaaccagtgccacggcgcaccggaaatcgcccactttgacgctaacggttggatcggcacgctcaacggcatgattggctttaccagtctcgataaacgtgaagaacgcaccttgttgaaatatctgcaaatgaatgcgtctgacaccgcaggtaaggctcacggcgataagaaggaagaaaaataatgaacaataacgatctctttcaggcatcacgtcggcgttttctggcacaactcggcggcttaaccgtcgccgggatgctggggccgtcattgttaacgccgcgccgtgcgactgcggcgcaagcggcgactgacgctgtcatctcgaaagagggcattcttaccgggtcgcactggggggctatccgcgcgacggtgaaggatggtcgctttgtggcggcaaaaccgttcgaactggataaatatccgtcgaaaatgattgccggattgccggatcacgtacacaacgcggcgcgtattcgttatccgatggtacgcgtggactggctgcgtaagcgccatctcagcgatacctcccagcgcggtgataaccgttttgtgcgcgtgagctgggatgaagccctcgacatgttctatgaagaactggaacgcgtgcagaaaactcacgggccgagtgccttgctgaccgccagtggttggcaatcgacggggatgttccataacgcttcggggatgctggcgaaagctattgccttgcatggtaatagcgttggtacgggcggagattactctaccggtgctgcgcaggtgatcctgccgcgcgtggttggctcaatggaagtgtatgaacagcaaacctcctggccgctggtattgcagaacagcaaaaccattgtgctgtggggctctgatttgctgaaaaaccagcaagcgaactggtggtgcccggatcacgatgtttatgaatattacgcgcagctaaaagcgaaagtcgccgccggtgaaattgaggtcatcagcatcgatccggttgtcacatccacccatgagtatctggggcgcgagcatgtgaagcacattgcggttaacccgcaaactgatgtgccgctgcaactggcgctggcgtatacgctgtacagtgaaaacctgtacgacaaaaacttcctcgctaactactgtgtgggttttgagcagttcctgccgtacctgctgggtgagaaagacggtcagccgaaagatgccgcatgggctgaaaaactgaccggcattgatgccgaaaccattcgtgggctggcgcggcagatggcggcgaacagaacgcaaattattgctggctggtgcgtgcagcgtatgcagcacggtgaacagtgggcgtggatgattgtggttctggcggcgatgctggggcaaattggcctgccaggtggtggttttggttttggctggcactacaacggcgcaggcacgccggggcgtaaaggcgttattctgagtggtttctccggctctacgtcgattccgcctgttcacgacaacagtgactacaaaggctacagcagcactattccgattgcccgttttatcgatgcgatcctcgaaccggggaaagtgatcaactggaacggtaaatcggtaaaactgccgccgctgaaaatgtgtatttttgccggaactaacccattccatcgccatcagcagatcaaccgcattattgaaggctggcgcaagctggaaacggttatcgccatagataaccagtggacctcaacctgccgctttgccgatatcgtgctgcctgcgaccacgcagtttgagcgtaacgatctcgaccagtacggcaaccactccaaccgtggcattatcgccatgaaacaggtggtgccgccgcagttcgaggcgcgcaacgactttgatattttccgcgagctgtgccgtcgctttaatcgcgaagaagcctttaccgaagggctggacgaaatgggctggctgaaacgcatctggcaggaaggtgtacaacaaggcaaaggacgcggcgttcatctgccagcgtttgatgacttctggaataacaaagagtacgtcgagtttgaccatccgcagatgtttgttcgccaccaggcattccgcgaagatccggatctcgaaccgctgggcacgccgagtggcctgattgagatctactcgaaaaccatcgccgatatgaactacgacgattgtcaggggcatccgatgtggtttgagaaaatcgaacgctcccacggtgggcccggctcgcagaagtatccgttgcatctgcaatctgtgcatccggatttccgacttcactcgcagttatgtgagtcggaaactctgcgtcagcaatatacggtagcgggtaaagagccagtgttcattaacccgcaggatgccagcgcgcgcggtattcgtaacggtgatgtggtacgcgtctttaacgctcgcggtcaggtgttggcaggggcagtagtttctgaccgctatgcacccggcgtggcacgaattcacgaaggggcatggtacgatccagataaaggcggcgagcctggtgcgctgtgcaaatacggtaaccccaacgtgctgaccatcgacatcggtacttcgcagctggcgcaggcgaccagtgcgcacactacgctggtggaaattgagaagtacaatggagcagtggagcaggtgacggcgtttaacggccctgtggagatggtggcgcagtgcgaatatgttcccgcgtcgcaggtgaaatcatgaccacgctgacagcacaacagattgcctgtgtttacgcctggctggcgcagttgttctcccgtgaactggacgatgaacaactgacgcaaatcgccagtgcgcagatggctgaatggttttcgttgctgaaaagcgaaccgccgctggctgcggcggtgaatgagctggaaaactgtattgccacgctgacagtacgtgacgatgcccgtctggaactggccgctgacttttgcggcctgtttctgatgaccgacaaacaagcggcgctgccgtatgcatcggcctacaaacaggacgagcaagagattaaacgcttgttagttgaggcagggatggaaaccagcggcaatttcaacgaaccggcagatcatctggcgatctatctcgaattgctcagccatctgcatttttcgctgggagaggggaccgttcctgcgcgaagaatcgacagtttgcggcaaaaaacactgacggcgctgtggcaatggttaccagagtttgttgtgcgttgtcgtcagtatgacagctttggtttttacgcggcactaagccagttattgctggtgttagtggagagcgaccaccaaaacagataacgtcgtttgtgcgcctgaaaagacgcgtttagcgtcgcatcaggcattatggggcagttgccggatgcgtcatcacatccggcaaacacacatcacggatgagctacaaaccgggaaagtcgctggcgcagcaggcggttttcctgcttcaggtgcgcaatatcatccattaacgtcagcgccaccgcgatcccaggccagtccagagccagttcatgacgcaggcgtactgcgcgttgcaccacgatggcggcatggtcgtcaaatacccaggttgtttcctggatctcacgcggttcaaccacccccaaaccgacaatttcattcaactcctcttcagagatgccggtatgcaggcaaaattcggtaatagtaaaagtcaccgtaacattagccattatgctttcccccaatctttacgtggatcaaaagacgactgggcgtctgccagttgctgccacagcgcggcagtgttttcatccggtttcggcggcatcacgattttcagtaccgcatacagatcgccggtctgttttttgctcaccagacctttgcctttaacgcgcaatcgttgcccggcctggctgcctggcgggatagtcagcaaaatgctttctttcagtgttggaacggtgactttagcacccagcgccgcttcccacgggctaaccggcaccacaatttccagatcctggccgacaatatcgaacagcggatgtggcgcaatatgaatcaccagccacaaatcgccatttggaccgccgttttcgcccggcgtcccctggcctttcagacggatgcgttgaccattgccgacgcccgccgggatcttcacattcagcgttttcggaatttcctgttcgatcatgccaaaggcgttataaaccggcaggttatagctgatggtacgcttatgctcagtaagcgtttcttcgaggaataccgccacttcgatttcaatatcgtggccgcgtgtggcggggcgttgacggctctggcgggcatgctgaccgaaaattgacgagaagatatcgtcaaaatcttcggcgttaaaactctgaccgtcgctatgatggaactgacggttaaattgcggatcgttgcgatgttgccacatctgatcatactcagcgcgacgttgttcatcacttaacacttcccaggcttcagcgacctctttgaagcgggcttcggcatccggttctttgctgacatcaggatggtatttgcgggccagtcgacgataggcggtcttgattgtcttgagatcgtccgtcggtttcacgcccatgatggcgtaataatcctttaattccatagcgttatctcgcgtaaatcaacacaaattgaaggaacccctgtaaggtaactcctataagtgtagggtaatcctcaaaatttcatatgccaacacagaatatgttattgaaatcatcgcggagaggaggtcgcctcaaggtggggtgctgaacatattttaaacaggtgaaaaagggtgagcgatttttgatagtggaaccaggcactttaagtttaactggggcgtcattatttattaaattttataggcgctatatatgagtagtaatatacatggaattagttgcactgcaaataattatttgaaacaagcctggaacaatataaaaaatgagcacgaaaaaaaatcaaaaatattcaatcacgctttttgaaaacacactggtgtgttttatgcggttgtataaagaaatcagacgtcaaaaagctgaagactacattccatgcctggaatgcgattcactagaaaaagaatttgaggaaatgcagaatgataatgatttatcattatttttgagaacattgcgtactaatgatacagaaacttattcaggggtttcagaaggtattacatatactatacaatatgttcgagatattgatattgttagagtgtccttgccgggcagaggttcagagtctatcacagattttaaaggttattattggtatggctttatggaatatattgaaaacattaatgcgtgtgatgatgttttttctgagtattgtttagatgatgaaaatatgagtatccagccagaatggataaatacgccgggaatatctgatttagatactggtattgatttgtctggtatatcttttattcagagtgaaattaataaaacttatggattaaaatacgctccagtagatggcgatggctattgtctgttaagggccatactggttttaaaagaacatgagtattcatgggcgctgggcagccataagacgcaaaagcaagtatacgaagagtttattaaaattgttgataaacaaacgatcgaggctcttgttgatacggcattcaatgatctcagggaagatgtaaagacattattcggcgttaatctacaatctgacaacaaaattcaggggcagggtggttttttatcatggagttttttgtcttttaaaaaagaatttattgatagttgcttgaatgacaaaaaatgcatactgcatttacccgaatttatatttaatgataacaaggtacgccttgttttagacaccgacccagagcagagggttaatgaggtgaaaaatttcctcactgctctttcagatagcatttgctcattatttattgttaatagtaatatggcatcaatctccttggggaatgaatccttttcaacagatgaagatcttgagtatggttatttaatgaacactggcaatcattatgacgtttacctccctcctgaactttttgctcaggcttacaagttaaacaataaggaaaggaatgcgcaactcgactatttaaatcgttatgcaatttactgacaagggcatgtgctaaaaaccattgttattagcctcacttctcttattattggtactattgcctctgtattagtaacgccgctgatatcctgtttagccacaggtgtaatcatcagcggtgtacgcgaggcaggggataagcagacatagcttgcatcaaaccttacctgtttttaaagatgaatataaaaacagccgctcaacaagctgttttgcgagcctgttcccggaaaaatgtcatatttctgtcacactctttagtgattgataacaaaagaggtgccaggaatgaacaaaacgctaatcgccgcagctgtggcagggatagttttaatcgcttcaaacgctcaggcacaaaccgtaccggaaggctatcagctacagcaagtgctcatgatgagccgccataacttacgtgcgccgctggcgaacaatggcagtgtgctggagcagtcgacgccgaataaatggccagaatgggacgtccccggtgggcaactcaccaccaaaggtggcgtgctcgaagtgtatatgggccattacatgcgtgaatggctggcacagcaggggatggtgaaatcgggggaatgcccgccgccggacaccgtttatgcctatgccaatagtctgcaacgtaccgttgcgaccgcacagttctttattaccggcgcattcccggggtgtgatattcctgtgcatcaccaggaaaaaatgggcactatggacccaacctttaacccggtgatcaccgatgattccgccgcattcagtgaacaggcggtggcggcaatggagaaagagctcagcaaactccagcttaccgacagctaccaactactggaaaaaatcgttaactataaagattcccctgcctgtaaagagaaacaacagtgttcgctggtggatggcaaaaatacctttagcgccaagtatcaacaagaaccaggtgtttccgggccgctgaaagtcggcaactcgctggtagatgcgtttactttgcaatattacgaaggttttccgatggatcaggtggcctggggagaaatcaaatctgaccagcagtggaaggtgttgtcgaagcttaaaaacggctaccaggacagcctgtttacctcaccggaagtggcgcgcaatgttgcgaaaccgctggtcagttatatcgacaaagctctggtcaccgatcgcaccagcgcaccgaaaattacagtgttggttgggcacgactccaacattgcctctctgttaacggcgctggatttcaaaccgtatcagttgcatgaccagaacgaacgcacgccgattggcggcaaaatcgttttccagcgttggcatgacagcaaagccaatcgcgatttgatgaaaattgaatatgtgtatcagagtgcggaacagttacgtaatgccgatgcgttaaccctgcaggcacctgctcagcgtgtgacgctggaattaagcggttgcccgatagatgccaacggtttctgcccaatggataagtttgatagcgtgttgaatgaggcggtgaaataacagaaaactcccccgcgagaagtgggggagtcgctggttaaacgtttttacgttcgatggtctgttcgccccaaaaaagcgaatctttatcggtcttagcaaaggctttgactaacacttcatcgctaccttcttcccaaatcttttccgccattttttcgtcgtacccggcgacttcgaaaatggcctcggctatttccggcgacgtattgcgcagagatgcccattcaccgacgtgatgagctttcgcttcttgagttggcatgcgtatcctcctgttgaagattagccgttaagtttaactgccagacctgcgacatattccccttgataacgagcaatagacagttcttcctggcttggctggcgtgagccgtcaccgcctgcgatggtggttgcgccgtacggcgtaccgccgcgaacctgtgaaacgtcaaataattcctgcgctgcgtagccaatggggacaattaccatgccgtgatgcgcaagggtcgtccaggttgaagtaatagtttgttcctgaccgccgccagtaccggtggaactaaagacgctcgccagttttccgtatagtgcgccggaagcccacaggccgcccgtctggtcgaggaaggtacgcatttgaccggacatgttgccaaagcgggtaggtgtaccaaaaataatggcgtcgtaatcggccagttcttgcggggttgcaaccggtgcagtttgcgttttaccgcctgctttttcaaataattgcggcggcatggtttccggtacacgcttaacgacaacttctgcgccatcgactttgcttgcaccctcagcgactgcgcgtgcttcatggtttcaatatgtccgtacatggaataataaagcaccagaactttagccatttctaaccactcctcgtgttatctctattccgtagcgattcgctaccacttatttaaagataagacgtccttttcagagtgcaaatttcacaaccacttatttgatttataacaactttcacaagcacgtaattttgtcgcaaaatgacacatttttatctcatcgcgtttttttaatcataagagcggcttatggataattatttgagatgatatctattctcgctaagaagctgttgcaggatattaccaaacgcgggtctgcccgcgtcagttcactaagcttagtcccacgtagcgaaaatatggcagccgccatacgccgcgttaattctatgcaatatgatgtctatacccagacggaggtcagtaatggcaaaccatcgaggcggttccggcaattttgcagaagaccgcgaaagagcatcagaagcaggtaaaaaaggtggacagcacagcgggggtaatttcaagaatgacccgcagcgcgcatctgaagcaggtaaaaaaggtggcaagagcagtcacggcaaaagcgacaactagccgggctaatcaatgacgaatgcatttttttcttaggctcgtcaaaaagtcatcaccgccggtaatcccggcggttttctgtttatggctcctgatgaacaacttctggcggtggaacgtcaaccaactttctgcttaacaacgcattgagtaaaatcgcgccaaaggttgctgtaccaatccctcccaacgtaaaaccgcccagcgtgagagcaaaatcacccgcgcccagcactaaggttactgcgaccataatcaaattaccgttctggcttaaatcgacacggttttgtacccatatccttgcgcctgcgacggcaatcagcccgaacacaacaattgatgcaccaccaatcaccgcggccggaatggtatgaatcagcgcgccaaatttcggtgaaaagcccaacagcatggcgatgacggcagcagcgacaaacaccagcgtcgagtagacttttgtcacggccattacaccgatattctcggcgtaggtggttacgccgctgccaccgacagaaccagaaagcatcgtcgccagcccatcaccgacgaatgcccgccccatatacgggtccatattgcgtccggtcatcccggcgactgccttgagatgacctaagttttccgccaccagaatcaccgccacgggcgcaatcagcatcattgcctgaccattaaaagcaggagtggaaaaatgtggcagaccgaaccaggcagcatggctgacgagagtaaaatcgacggcttttcccagccctaaaacgttggtcatcacgccatacagcagacaggcgacaattaatcctacgagaatcaataaccgctggatcatgccacgggtaaacaccgccaccagcccaatacacagcaccgtcattaccgccatccagctatcaaaggccgaagccgatacacttttcactgcgataggcgctaagttcaggccaatcgccatcaccaccgcacccgtcaccaccggcggcatcagtcgttcaatccagcgcgtaccgattttcatcaccaccaggccaatgacggtataaaccagcccacaggcgataatcccgcccagcgcaatgctgatattcgggttaatgccctgaccgttaaagcccgtcgcggcgatcaccacgccgacaaaagccgcgctggagccgagataactggggacgcgcccgccggtaataaagaaaaacagtaacgtgccgatccccgacattaaaatggaaagattgggatccagccccatcagaatcggcattaacaccgtcgcgccaaacatcgccaccgcgtgttgaacgcccattactgccgtctgagcaaacggcaatcgttcatccggcgcgaccacgccgctctctgtagaggtcgattttaactgccagtgaggaaaaccgaacattgccatcagcagtctccttaaggaggttaacaagcagggcgcatcagcgcgtgataactgcgatcgaaccacaccagcccgtagggtgtggtgtgacgatgaatcgcttcgatggcgcaaaacagaatgtcgtgggtgccgacgctcaccacctggctgatacggcagtcaaacgaaaccagagcctcttccagttgcgggcatccggtcacacccgtctgccagcgggcggcggcaaagcggtgttccatgggcgttttgccgccaaaaagatttgaaagcggctcctgcccggcgctcagtgtatttacacacagcgttcgattttcattgaataccggccagacggacgccccacgattcaggcacaccagtaatgtgggcggcgtatcggtcacgctgcagacggcgctggcggtgaacccggcgcgcccggctggaccgtccgtggtgatgatattgaccgccgcgcccatacaggacatcgcatcgcgaaaggtttgttgatcaactatgttcatagtttgctccttacaacagcccgcaggcttcttcaaaggacagacgtggcaggcgcgcataaagtttgctgctatcgccatagccgatattaatcagcagattgctcttcagcgtgctgcctgcaaaaaagcgtcgtcaacgtattgacggtcaaaacccgacatcgggccggtatccagtcccagcgcacggcaagcgacgatcagataggccgcctgcatggagctgttgcgaaacgctgtttcttcggcaagttgtgggctggaggtaaaccaactgcgggcatcaccgtggggaaacagtagtggtaaccgttcataaaattcactgtcccaggcaacgatagcggtgacgggcgcggtcagggttttttgtagattgccgctggaaagcgccgggcgcagacgttcttttccttctacagtgcggataaacacgatccgtgccggagaacagttagctgatgtcggcccccatttcatcagggcataaagctcccgtaacgtctcatcgctgacgggtgtctcccgccagccgttgtgagtgcgggcatcggtgaacagggtgctaagcgcacctgggctaacggcttcgttcatagcaattccttacagggcggcttcgcggtgatgtaacaggctggcaagcccgttgagtaaaagagcattaaacgtttcggggtcggtcacgttgcaggcgtgtccgccatagcgcatcaccattttctggctatcgggcagggcggcatgaagctcactggaacatgctgatggcaccagcagatcatcactggcgcagatgatttgcaccgggcagcggatgcgatccgcatggtgactaaagtcagcgcgtttgagggcgttaagtcgacgcagtaaattatttttgccctgaaaatgcgccagtgccagcgcgtcttctgcctcaaggcgaggtgcgcgggccgccatccagtcggcgggatagaggaacaacggctgcgcttccacccatgcctgcgcgccgccgctatacagtaatcgttcgcgaacctgaaaacagcggcgcgtatgggcgtttattcgtagccagccgttaacgctgatcagcacagttaccgacgcgggataatccagcgccagctgcattcccaccagcgcaccgagcgcatggccgaccaccgcgtaatgctcaatccctgcggctaccagcgcctgatgcagttccgctgccatctgggcgatactgtaatcttctgccagcgtgtcgggattattgccggtgccgcgctggtcgtaacagactacctgatactcctgctccagcaccgccagttgcggtaaccagtaactgccgctaccgccaagacccgaaatcaacaccactacgggcgcatcagcataagggggaggtgagagtgaaagtttcatcgcggcctcacttggcgatatgcgcaattgtggcgatttccaccagcgcgtcaggttttaccagtccgcactgaatgcagaatcgcgccggtttatcacccggaaaaaactcggcgtagatttcgttaatcgcggcgtaatttttccagtcggtaataaagatgctgttgaaggtcacatccgccatcgtgccacccgccgtctcgatcaccttgcggataatttccagaacgtggcgggtttgcgcctttgggtcatcggcaaacagcacgttattatgttgatcaaaagccagcgtaccggagacatacaccacgccatcagccagcgtgccgggaacgaagggggccagcggtgcgctgctgccagcgggaataattacggattttggcatcgttaaactccttaagcgatacgagcaaaggatgtgggagaaagcgcgtcgcagaacgtttcgacgtcgctgacccagccaaaaaaggtttcgatattgaacaacgcggctttctgtgcaaattccggccccgcctggtgtgttgcgtcttccagcaccacgccgaaatactccagaaaaaagccatcgcgtagcgtcgattcgacgcagacgttggtagcgataccggtgaaaaccagatggcgtattccacggctgcgcaaaatgctgtccagcggtgtattgaagaaaccgctgtagcgcggcttcggcagcacaatatcgccaggctgcggcaccagttcatccaccagttgataatcccaggagcctttcgccagcaatttcccctgcagctgcggctgcttacgcatggttttcagggcgttcgatttatgaaaattcggtgagccgggtccgccagcttcgacatactgttcatcccagccattttgaaaccagatgatcagcatccctgccgctcgcgctgcggtcacggcggtttgaatgttggcaatgaccgggcgagtggttgagacatcaaacccggcgagatctaagtagccgcctggcgtggcataagcgttttgcatatccaccacgatcagcgcactttgctgcggatcgaaggtaatggcttccggtcgagcggttaaggttgtcatcatgccacctcctgagtcagcgcaggtagatgggcgcggcactgcatcagtggttgaatgcgctcgccgaaggtttcgattcccgacagaaaatcatcgaaggtcaacagcacgccttcggcaccaggcacgcttgcgacttcatctaacatgcgcgcgacactggcgtaagaaccgactaacgtccccatattgatgtttaccgccgaagtgggatcggccatctgacggacgttggtatcagtaccggagcgggtatctttctgactttgttcggttagccagcttaacgcctcttcatccgcgcccgctttgtagtgttcccatttggcgcgagcggcatcgtcggtttcatcggcaatcaccataaacaacacataagaaccaacgtcgcgcccggtttgctctgcggcctgtttcatccgcgcagcggtcggggcgaaagccgtgggcgtatttacgcctttgccgaaacagaagttgaaatcggcatactgggcggagaacgccatgccagcgtcgctttgcccggcgcagatcactttcatggggacactcggttgcggactgacgcgacaatcattcatggtgaaaaaatcgcctttaaaatcgcttttccccgtgccccacaggtcgcgcagcacctgaacatattcggtgagatagtcgtaacgacgggagaaatagtcatcgccaggccagatacccatctgctcatactcgggctttgccagccagtcacgaggttgacgccaaaacgcccgccagagatggagtcgatggttgcggccatacgggcgacgattgccggaggtaacgttaaggtggcagcagtggcgtaaatctgaatgcgcgaggtgacggccgccagccccgccatcaaggtgaacgactcaaggttgtgatcccagaactcagttttgccgccaaagccacgcagtttgatcatcgacagggcgaaatcgaaatggtagtgctccgctttttgcacaatggctttattcagttcaaaggtcggcatgtactgcggcgcgtgggtcgaaatgagccagccgttgttgccaataggtacgaatacgccaattttcatcatcaacctctcttcgtctcgtaaagtgaaagtcagacggggcgctgcatcctgcatatccttttcagccgcgtaatggcttgtttgcaaagcggatgccagtttttaaaaagtgaatgttattaatgtgttaacattgggttgtctaaaatatctggtaaaaagtggactaaacggtcaaaacagttgcacataaaacatgcatctgtgcgcgatgagagtgcagaaggtcgaggccgggcgggggttttgctatcctgttgccaatctacaagaggggagagcgcatgacgcaaggcgcagtgaaaacaacgggtaaacgttcgcgcgcagtaagcgcgaagaaaaaagcgattcttagcgcagcactggacactttttcacaattcggttttcacggcacaaggctggagcagatcgcagagttggcgggtgtttcaaaaaccaatctgctgtattactttccgtcaaaagaggcgctgtatattgccgtgctgcggcagattctcgatatctggctggcaccgttaaaagcgtttcgtgaagatttcgctccgctggcggcgataaaagagtacatccgtctgaagctggaagtctcccgcgattatccgcaggcttcgcgcctgttctgtatggagatgctggcaggcgcgccgctgttaatggatgaactgacgggcgatttgaaggcattaattgatgagaaatcggcgctgattgccggttgggtcaaaagcggcaaactcgcgccgattgatccgcagcatttgattttcatgatttgggcttccactcaacattacgccgatttcgcccctcaggtggaggcggtgacaggcgcgacgttgcgcgatgagatatttttcaatcaaacggttgaaaacgtgcagcggattattattgaggggattcgaccacgttaaagatgccggaggaggttgtaacatcctccggctacctgtttaacctatagtcattaaactggcgttaccgccagcggcagcggtattcacactcagcgaacgttcgatatacagccgttccagaaggatattgctttcgccacgggcaaaaccctgcaccgaaacaattgcgccatcccgcgcggcaacggcttcacacaatgcgcgaagctgatccgaatcaccgtggaagatcaccgcatcaaacggttgagcggttatattttccgctttcgccagttgaatacgttcgctgactgccgatggcaatgccttcactagctgacgatgcagcgcgtcatccggccacagtacctggctgcccaccgccagcacggcggcgagctgagtcagcgcatcctgctcatcatcggcaatacacaacacgcgctcacgcggcagcagcgtccaggtgttgcgttcacccgtcggccccggcagcaatcgttgtgttcctgcctgcgccagctcgccatattgcgtacataacgcctgcaattctggacgatttgctgcccattcccgcagtgcatttagcggctgagtcaatgcggctttcaactgtgcatcgaccggatactctgcatcctgacgcgcgagcgtcactgccagcgcactttccgggcgattcgccagcagacggtagagatagagcggaccgcctgctttcggcccggtaccggacaacccttcgccgccgaatggctgcacacccaccactgcgcccaccatattacggttaacatacaggttaccaacatgggccgagccagtgacctgggcgatggtttcatcaatacgcgtatggacaccaagcgtcagaccatagccggaagcgttaatctgctcgatcagctctggtagctggttacggttgtaacgcaccacatgcagcaccggaccaaagacctctttttgcaattcggcaaagtcatccagttcgatcagcgtcggggcgacaaaggtgccgctttgccattcacgggcatcttcgctgttttcccgcaccgcctggaacaccggacggcctttgctacgcatggtctgaatatggcgctcaatattggctttcgcttcgctatcaatcaccggaccgatatcggtggtcaggcgacccggattacccatccggcattcggccattgcaccgcgcagcattttcaacgtgtggtcggcaatctcatcttgcaggcacagcacgcgcagtgccgaacaacgctgacccgcactgtcgaacgccgaggccagcacatccacgacgacttgttcggtcagtgctgaagaatcgacaatcatcgcgttcatgccgccggtttcagcgatgagcggaatagggcgaccctgagcgtccaggcggctggcgatattgcgctgcagtaacgtagcgacttcggttgaaccggtaaacatcaccccgcgcacgcgatcatcacccgtcagttgcgcgcccacggtttccccctgacctggcagcaattgcaccacgccagggggtacacccgcttccagcaaaatggcgatcccttgcgcggcaatcagcggcgtttgttctgccggttttgccagcacgctgttacctgccgccagtgcggcagcgatctgcccggtgaaaatcgccagcgggaagttccacggactgatacacaccacaggccctaatggacggtgggtttcgttagcgaaatcatcccgcacctgtccggcatagtagtggagaaaatcgaccgcttcgcgcacttcggcaatggcgttactgaaggtttttccggcttcacgcaccagaataccaatcagttgctgcatctggctttccattagcacggcagcgcgatgcaaaatcgccgcgcgttcaaccggaggagtggcaaaccagattggcgcgttattaaccgcactttccagcgcctgttctacctcacgcggcgtggcttcacgcacaaagcccacaatatctttcggttccgcagggttaataacgggcgacatctcacctgccgctaccggttgttccagcattggcaaggcctgccattttgcagtgcactattgagcagggcagaagagagcgaggccagccggtgttcgttagcgagatccagccctgccgagttgtcgcgcccgtgaccgtaaagatcgcgcggcaggggaattttcggatgcggtaatccagtttgcccttcctgttgcgccagtttttctacagcagtgaccggatcggcgaccagttcatccagtggcaaagaggtgtcggcaatacggttaacaaacgaggtgttagcaccgttttccagcaggcgacgcaccagatacgccaacagcgtttcatgggtaccgaccggagcataaatacgacacggacggttaagtttgccgtcggcaactttcccggtgacctgctcatacagtggctcgcccataccatgcaggcactggaactcgtactgacccggatagtagttctgacctgccagttgataaatcgctgccagcgtatgggcgttgtgcgtcgcgaactgcgggtagattagattcggcaccgccagcagctttttcgcacaggcgagatatgaaacgtcggtatacaccttgcgggtataaaccggatagccttcaaggccgtccatctgcgcacgcttgatttcactatcccagtacgcgcctttcaccaggcgaatcatcagacggcgacggctgcgggtggcgagatcaatcaggtaatcaatcaccagtgggcagcgtttttgataagcctgaataacaaaaccgataccgttccagcctgccagctcaggctcgaaacagagtttttccagcagatcgagggagatctccagacgatcggcctcttcggcgtcaatgttgataccaatatcgtactgacgcgccagcagggtgagtgatttcagacgtgggtaaagctcttccattacccggtcatactgggcgcggctgtaacgcggatgcagcgccgacagcttgattgaaatgcccggaccttcatagatgccacgaccattggacgctttaccaatggcgtgaatcgcctgctgataggaaaccatatacgcttgtgcatctgcggcagtcagtgcagcttcgccaagcatatcgtaagagtaacggaaacctttctcttccagcttgcgggcattggctaacgcttccgcgatggtttcgccagtgacgaactgctcgcccatcaggcgcatcgccatatccacacctttgcggatcagcggttcaccgcttttaccgataatgcggttcagcgagcgggagaggctggcttcgttatgggtggaaaccagtttgccagtaaacagcagcccccaggtggcggcattaacaaacaaagacgggctacgaccaatgtgtgattgccagttaccgttgctgattttgtcgcgaattaacgcatcacgggtggctttgtcgggaatacgcaacaacgcttccgccagacacatcagcgccacgccttcctgcgatgacaacgaaaactcctgcaataacccctgaaccatacctgcgcgaccactggcgtttttttgattacgcagtttatcggccagttgatacgccagtttgtgcgcctgttcagcaactggctgcggcaggcgggcttgttccagcagcatagaaaccgcttcggtttccgggcggcgataggccgctgtgatcgcggcgcgggaaaccgactggggcaaaatttgctcggcaaagtcgaggaatggctggtgtggttcctctgccggagtcggtgcttcatcgctctcattggcagcgccagaaagcagcgcaggtagctctggcagagtatcgctgttttccagttgttcgagataagaaaaaatcgcctgcttaattaaccagtgtggtgtgcgatcgatacgtgtcgcggcagacttaatacgctcacgcgtcgcgtcgtccagcttaacccccatggtggtggttcccatgccattactcctgttgttctgaaaggtgcaacttaacgttatcgtgaaatatccatgatgttgcaactttgtgcaaccatgttaaatgtgacctgcgtagcaagcttaaaaatgaatgaaatgttaataaaagaaatcgatatgacagggattaaaaaaataactcagactttttctctgcggcagttaacatttttgaaaggtgcaaccgcaaaaaatgtgagagagtgcaacctgatgaaaaatagtgtcgctgagcactaaaatttaatgtaaatggtgtgttaaatcgattgtgaataaccagcgcttccggcaggatacggtcgccctggtaaaacataaactctgttaccccgttccggtggcagatataacggcaagtttcgacattgccgataataattttttggagactttagatggctattagcacaccgatgttggtgacattttgtgtctatatctttggcatgatattgattgggtttatcgcctggcgatcaacgaaaaactttgacgactatattctgggcggtcgtagtcttgggccattcgtgacggcattatcggcgggtgcgtcggatatgagcggctggctgttaatggggttgccgggcgcggtttttctttccgggatttccgaaagctggatcgccattggcctgacattaggcgcgtggatcaactggaagctggtggccgggcggttgcgtgtgcataccgaatacaacaataacgccttaaccctgccggattatttcaccgggcgctttgaagataaaagccgcattttgcgcattatctccgcgctggttattttgctgttcttcaccatttattgcgcttcgggcattgtggcaggcgcgcgtctgtttgaaagtacctttggcatgagctacgaaacggctctgtgggcgggagctgcggcgacgatcctttacacctttattggcggtttcctcgcggtgagctggactgatactgtacaggccagcctgatgatttttgccctgatcctgacaccggttatcgtcattatcagtgtcggtggctttggtgactcgctggaagtgatcaaacaaaagagcatcgaaaacgttgatatgctcaaaggtctgaactttgttgccattatctcactgatgggttgggggctgggttacttcgggcagccgcacattctggcgcgttttatggcggcggattctcaccacagcattgtccatgcgcgtcgtatcagtatgacctggatgatcctctgcctggcaggggcggtggctgtcggcttctttgggattgcttactttaatgagcacccggcggtagcaggcgcggtaaaccagaacgccgagcgcgtgtttatcgaactggcgcaaattctgtttaacccgtggattgccgggattctgctgtcggcaattctggcggcggtaatgtcaacgttaagctgccagctgctggtgtgctccagtgcgattaccgaagatttatacaaagcgtttctgcgtaaacatgccagccagaaagagctggtgtgggtagggcgtgtgatggtgctggtggtggcgctggtggcgattgcgctggcggcaaacccggaaaaccgcgtgctgggcttagtgagctacgcgtgggcaggctttggcgcggcgtttggtccggtggtgctgttctcggtgatgtggtcacgcatgacgcgcaacggtgcgctggcggggatgatcatcggtgcgctgacggttatcgtctggaagcagttcggctggctgggactctacgaaattattccgggcttcatcttcggcagtatcgggattgtagtgtttagtttgctgggtaaagcgccgtcagcggcgatgcaaaaacgctttgccgaggccgatgcgcactatcattcggctccgccgtcacggttgcaggaaagctaagggacttagcctgcggcggttttgtttggcttcagcagcgggttgcgctcccttaatgtgcctcgccatataaattgaatggtgcagggagcgcgcaggggcggccaatcgccgccgccccctgctgtcccggccttcggggaacgcttcagcgattttgacgccaccaacacccgagctgttattatgttccgggcaaaaagttagatttgataatcgcggatggacgaaattgcttgatacacccgcttatcagttttacatggaagctctgatgcattgagtctggacagttttgtcggctggatacggcgtttacgcggcatccggcaagaacacatggctcgttgtaaacaatcccatctttgtacctggaataatcgtttatatcccctggcattacctctctttgtttacatttcaacatcattttataaacattccgcttgtatttttctttaccgtaatgataatcgctatcactgcgatttacttttctttgcatagattgactcagaaaaacgtttaagggtgggtggcatgtttgttccgtttctcattatgttgcgcgaaggacttgaagccgcgctgattgtcagtttgattgccagctatcttaagcgtacccagcgaggccgatggattggtgtgatgtggattggcgtgttgcttgccgctgcgttgtgcctgggcttggggatcttcattaacgaaaccaccggcgaatttccgcaaaaagagcaggaactgtttgaaggtatcgtggcggtgatcgccgtggtgatccttacctggatggttttctggatgcgcaaagtgtcgcgcaacgtcaaagtacaactggagcaggcagtcgatagcgcattgcagcgtggaaatcatcatggctgggcgctggtgatgatggtcttttttgccgttgcaagggaagggctggagtcggtctttttcctgctggcggcatttcaacaagatgtcgggatctggccgccgctgggtgcaatgctcggtcttgctactgccgtggtgctaggcttcctgctctactggggcggtattcgcctcaatcttggtgcattttttaaatggaccagcctgtttattctcttcgtcgccgcagggctggcagctggtgccattcgcgcatttcatgaagccggattgtggaaccactttcaggaaatcgccttcgatatgagtgcggtgctctcaactcactcgctgtttggcacgctgatggaagggatttttggctatcaggaagcgccgagcgtcagcgaagtcgccgtctggtttatttatctcatcccggcgctggtggcatttgctctgccaccacgcgcaggggcgacagcgtctcgctccgcgtaacaaatacgacgcaaactcttgcttagttacaacatactttaaagggatagtctcgtcatgaccattaacttccgccgtaacgcattgcagttgagcgtggctgcgctgttctcttctgcttttatggctaacgccgctaatgtgccgcaggtcaaggtgaccgtgaccgataagcagtgcgaaccgatgaccattacggttaacgccgggaaaacacagttcattattcagaaccacagccagaaggcgctggagtgggagatcctcaaaggcgtgatggtggtggaagagcgggaaaatatcgcccctggctttagccagaaaatgacggcgaatttacagcctggcgaatacgatatgacctgcggtctgctgactaacccgaaagggaagttgatcgtcaaaggtgaggcaacggcggatgcggcgcaaagtgatgcgctgttaagtcttggtggtgcaattactgcatataaagcgtatgtcatggcggaaaccacgcagctggtgaccgacacgaaagcctttactgacgctattaaagcaggcgatatcgaaaaagcgaaagcactgtatgcgccgacgcgccagcactatgagcgcatcgaaccgattgctgaactgttctccgatctggatggcagcattgacgcccgtgaagatgattacgagcaaaaagccgccgatccgaaattcaccggtttccaccgtctggaaaaagcattgtttggcgacaacaccaccaaaggcatggatcagtacgctgaccagctttataccgatgtggtcgatttgcaaaaacgcatcagtgaactggctttcccaccttcaaaagtggtcggcggtgcagccggactgattgaggaagtggcagccagcaaaatcagcggtgaagaagatcgctacagccacaccgatctgtgggatttccaggctaacgttgaaggctcgcagaaaattgtcgatctgctgcgtccacaactgcaaaaagccaacccggaactgttggcaaaagtcgatgccaactttaaaaaggtcgataccattctggcgaaataccgtactaaagacggttttgaaacctacgacaaattgaccgatgccgaccggaatgcactgaaaggaccgattactgcgctggcggaagatctggcgcaacttcgcggtgtgctgggattggattaagcattatgcagtatgaagataaaaacggcgtgaatgaaccgtcacgccgacgtttactgaaaggcattggtgcgctggcgctggcgggaagttgtccggtcgctcatgcacaaaaaacgcaaagtgcgccgggtacgctttcaccggatgcacgcaatgagaaacagccgttttatggtgagcatcaggcagggatcctgacgccacaacaggccgcaatgatgctggtggcgtttgatgtgcttgccagcgataaacccgatcttgaacggttgtttcgcttgttgactcagcgttttgcttttctgactcagggcggagcggcaccagaaacgccaaatccgcgcctgccaccactcgattccggcattcttggcggctacattgcgcccgataatctcaccatcacgttatcggtgggtcactcattgtttgatgagcgctttggccttgcgccacagatgccgaaaaagttgcagaagatgacgcgttttcccaacgactcgctggatgcggcgttatgtcatggtgatgtgttgctacaaatttgcgccaacacccaggacacggtgatccatgcgctgcgcgatatcatcaaacatacgccagatttgctcagcgtgcgctggaagcgggaagggtttatttccgatcacgcggcgcgtagtaaaggcaaagagacgccgattaatttgctgggtttcaaagacggcactgccaatcccgatagccagaatgataagttgatgcaaaaagtggtgtgggtaacggcagatcagcaggagccagcgtggacaatcggtggcagctatcaggcagtacgcttgattcagtttcgagtggaattttgggacagaactccgctgaaagaacagcagacgatttttggtcgtgataagcaaaccggtgcgccgctgggaatgcagcatgagcatgatgttcccgattacgccagcgatccggaagggaaggtgattgcgctggacagccatatccggctggcgaatccccgcacggcggagagtgagtccagcctgatgctgcgtcgtggctacagttattcactgggcgtcaccaactccgggcaactggatatggggctactgtttgtctgttaccaacacgatctggaaaaaggcttcctgactgtacaaaaaaggctcaatggcgaagcgctggaggaatacgttaaacctatcggcggcggttatttttttgcgctgccgggagtgaaggacgcgaacgattatctcggaagcgcgttattgcgggtttaatgtttatagacggataaggcgttcttgcgcagatgcctgatgcgatgcttgcgcgtcttcttatgcctacaatcggtgcgggttcggtaggcggataaggcgttcacgccgcatccggcgttcgtgcgcagatgcctgatgcgaatcctgctgaaagcacacagcttttttcatatctgtcatcactctgtcatctttccagtagaaactaatgtcactgaaatggtgttttatggttaaatataagtgaatatattgttgcaatgaatgcgagatctgttgtaattattaagtagcagcggaagttcccggcagtgatagtcagtcactatggagatcgcggatggtaacgtcctgttctggacaatgtcttgttaagctacgctccaccacttgcggagatttctcctccggtagcaacttcgtcactctgtatttttctcacttcctctctttactcgtgttaccgacgccgcaaacggtgtgcgtagccgtttttcggcattttatccaaaagcaaactatggcttacaaggaagccaaccctctgatgttcgtgcgcataatcgcgctgccaacggcgcgtgtgatgaatacaaacaactcaaggtgctctccatgggaagacaaaaagcagtgatcaaagctcgtcgtgaggcaaaacgtgtgctgagacgggattcgcgcagccataagcagcgtgaagaagaatcggtcacctcgcttgtgcagatgggcggcgtagaagccattggtatggcccgcgacagtcgcgatacttcgcccatcctcgcgcgaaatgaagcgcaattgcactatctgaaggctattgagagtaagcagctgatattcgccacgggcgaagccgggtgcggaaaaacctggatcagcgcagcaaaagcggcagaggccctgatacataaggatgtcgacaggattatcgtcacccgtccagttctgcaagccgatgaagatcttggcttcttacctggagatatcgcagaaaagtttgctccctattttcgcccggtctacgacgtgctggtccggcgcttaggggcttcctttatgcagtactgcctgcgaccggaaatagggaaggtggaaattgcgccgttcgcctatatgcgtggacgtacctttgaaaatgcagtcgtcattcttgacgaggcgcagaatgtgactgccgcgcaaatgaaaatgtttttaacccgcctcggggagaacgtgacggttatcgtcaacggtgatatcacgcaatgcgatttgcctcgcggcgtgtgctccggattaagtgacgcgctggaacgtttcgaagaagatgaaatggttgggatcgtccggttcggtaaagaggactgcgtacgttcggcactttgccaacgtacgctgcatgcatacagttaagtgtattatcggtgcagagcccgggcgaaccgggctttgttttgggtgtttatgcccggactagcgctttttctgaaacaaccatttttatttgcccctggctggtgaagtgtacgctcatcctatggcttttttgtagttgctgatagagctcatcaggtattgctaagctctctgcatattcttgcggcgtatattggtaggctgcatgatgctgctgtttttgaaaacgcagcttattgtacagcgcccagacaattaacacgacggcattcgccactgccagcaaaaaatagaactgaagtcggcttctggcctcgctttgccagtaataacccgtcagcagatccatggcgaataagaatatgaacaacgcaaataatgtccacaagatggttgtggcaacataatcaaccagtaaacgtactggtgattgtcgggtcgtaataattaaattgttcatattaacctctcagaatcccgcgatcgggacttacccaacgggcgcgttgctttttaggcatcaacatgactcgtgtaaatgataccaatgtcgttgccaggctcagcatccagaaaataaccgggaaccaaataatccagaaaagcgatgaagtcagattatgctcatagcgattctcgatcatcaggctgacaataaattgcagtaaacataacgtacacaataatattccggcagtatgtgtcgcagcgatatgtgtcaattcaatatttaacggtacaccggcaagttggactgcgtaaataatgaaaccgaccaggcaggtgaaggcccatattgtcgtcaggcagtattcaaaaaacagcggccacattcgaaagttttctttgcgccacaaccttgtcatatttttgaggaatacttctgcaccgccctgagcccagcgcaggcgctgtttccacagcccttttaacgtttcaggcattaatatccagcacagcgcccgtggctcgtaaaaaatcgtccactgattcaactgcagcttccagctaatatcaatatcttcggtgatcatatcgtcactccagtaacccacttctgccagggcgctgcgacgaaatgcggcaataacaccggaaacggtaaatacgtttccatagatacgctgggttcgcttgatcaaaccaataattgaggaatactcgccaacctgaattttacccaccagggtagaacgtgttcgaatacgaggattaccggttacggcacccacacgcgggttgtacaacatcggttccacaatatatgccgccgcatcgcggtctaataacgcatcgccatcaatgcacaccagatattcacttttcgccgcggcagctccggttttaagcgcaatggctttcccctggttttgcgccagatgaatgacccgcaaatggggaatttgtgcagccatgcgatccaggatggcacgggttttatctgttgaaccgtcatttacggcaataacttcaatgttctcataacgctgtgctaaagcggcgtgtatggtttcctcaacgtttttctcctcattaaaacagggaatgataatggagatagacggattatctttcaactggggagctggtgcgttttctccccacggccagtggcgttcacgatagacccagaaatagacgccgccaacaatccacataatggacataaaaaacggccagaagaaaacgaacctcatcatcagttcaccagagtgaaagtacgctacgcataggggtatgcataacaccagacataatataaaaaacgatacgatgcgattaatcatttttcggataccaggctgttgaaaactcaggacgaataaggtctatttcaggttggttatgcagaaaattgtcgggataataaccatagtttttcactccattcagttgtaataggctcatccagtgagcgagttgttgcgaagaaatagcctgatgctgaccatttttctgccagttttgtgcctgtaattctaaaatagatttgtctttagcctgagggatgtttttaatttgattggtcaattgtattaaccattggtcagccgatttttctgcgacaccttccagataaggcatagccataatagcggtccagtcatagctttttaggaaatcagcataattctgtgcaaaccaggcttcactttcaggttgtattaccggaagtgcaaaaatatttcgtgcagttttaatatgtggaccgcgaatggcttttacgcgcgcactaagttctaaagtgaagtcagttaacgcacgacttttaaagcgggcccactgtttaaattgctccgggttttgtcgaatttcgctcagactcccgctaaagcctgcttgctgataagccgtgatagccggtgcactggcatcttcataatctgaaagcaaagcatcatcgtggaacaatatgccatcaaaagcagcatgtccggcaagatcttcatataacatgccaacttgtgctctgactctgtcatcgaaaggagagagacggtgatattgttcaggatgaatttgtgcttttttctcccctgttggtaagtattttactcgcgttaatgtgggatctaaatcccagcttaataccggcatccacgcatagatgtttacacctgagcgggtacgtaattgccaggcaacccgactaaaaatatctgctttcattggtagcaaacgatttggaaaccagacctctttgaccagcccatcaccatcgggatcagcaaatgcctgcaaatacacggttgatatttgcatatctttcacccgctgaattagcacatcaatattgcgatccatttgctggaggttttcgtcataaacgtaatcaagatcgatatgcattatccgttgtggtgatttttcctgtacggtaataatttgctgggcaaactcttttaatgagggattattggcgattaatacccgcggaatggaatccaattgcgacgcatttgccaaacctgattcaagggtgaagaacatgtcataaccgagtttttttaattcctctatcgctatgccattcgcttcgccataaggccaaacaaaaacgtgtggatttacctcaacctttgtacgcaggtattccgtcatttttacagcatccagacgaattctttcccggtattctgctgcggtttcataccgtgcgtggtcagtaaaatatgcacgatttacatatacaggcaataagctgccggtggcattagcctgaataccgtagtgagaattccatgtatgagaagcgagctcaacgagccgggaacgcgcaacttctcgcacttgttgccacgtggcaaaatattctcgatcgaccaactcatcgccaaattttacttgtttatccgctggcgtatcgacccaactgccgacgggggcccatacagcaggccactggaaggcctgaagaattgggaagacgcgggtataaaaactctggtagccgtcatcaaaagtcagcactacagctttttccggtagcggttttcctcctcgatgtgcttcacgaatttgagcaatactgaccggttgataaccgttctcgcgcagccaggcaaattgttcacgcagtgctgatgtccgcactgacataaaacgctggtcggcagcttcgtcttcaacgttatgccatgaaatcgctacaaaaccattatgcggccacggttgctcggcgagtaaagattcgcgatcctgtggcggtataaatgatgttcttgactggctaatgcacgcggtgagcataattatactcaccagcatcaggagatatttatttccattacgtaacatatttatccttaaaatctgaatgtcatatcgaattcaacgtataagttgtgttctctgtcaccgtcataaggtcgtttttcccagcgtagcgttgcgccagcatcaatcacgtcattccagctaatgcgttgcccgtagccgagttgggtgacgacatccgtgccataatgtttttgccaggaggcaccaacacctgcgctgaatatttgctcccagctattttcatagcttcgccataacaaatggcttgcctcaaatgccggaacaatatcgaacgtttctatagggttgtagtatggggtatcgtgttctgtattttgttcgtaatacagactgggtaggaaatcgacaatcaaatatggtgaagaccagatgcgttcctgaccctcaagtgagacttcatgacgctggttactgtcggaaaaatcagtgaaagcccaggagacaccgtacttacgccgctcattttgataccagcgaacataagcctgagcactgttgcctgtaacaccatttttcattgcccgtaatggaacgcggtgagagaggcgttccagttgcgaaccaatacgccagttatcattaaaatcataccagccagacaggcgcgcgccgggtttatgctcatgattgaaaacgcgttcagcgtactctgcctcgagccagatattacgtgaccgccactcaacacccgcaagccagtcgcgaacaatcccttttacttcgctaaattgtccatcggcataaccgaatccagcaaaaccgcgccagttatccttcagcggtggtgaataaacgatggtggttaagtcgacatcatgtttaccactatccgggccttcggcatcaattcctgttgagccagcgatacgaagctctgcaagattatgtacatcaaccgcacgttttaatcgtacaacgccgggatcttgcggttcacgttcgacaacatcgtgcgttaagacagctgcctgctgccattcttgtaacgttaatgctgtccaggcttgttcaacctccagattaatattacgtggctcgatcacttctgctttttttaattcattttctgctgcacgaggccaaccgcgggcttgtaacacactcgcgtaatcaatgcgcagtccctgatttcctggtgcgttataagcaagctctctggctgtcatttcagcctgaggaagatcattactatattttgctacggttgagagaaacgaatgcccctgtaaccaggtatcattcgggatgctcgtaggcgtgcccattaaccgaaggaaaggcggcgaagtattaatggtatgttgggtgacagttagcgcgcccggataattttcactctccaggtggctgtaaaagagatccgcaagttcttcatcggataaatccggggcaatggtctccttgtgataaaagagctcggtcattattgactgtgctttttcggctgatgatctttgagataagccgatgcaacccaatattgcccccagggcggaataatttgccccgtcttttttaatcgctgatagtgagaaataacgtctttataacgatcgcgagttaataacgcgccaagatgatcaacctgaatacgctggtactgggcagtacggtctgggttatcgtgccacagaatttctaatgcagcgtattgggcgagggcgcgatcggcaatggcataacgttcactttcactgcgcgtaggcataaacgacagtctgaccagttcggcatgaatatcagcgcgaatatctggcgttaaattggcatcgtcaatcgcggcagcaagttgattattacgtaatgcctgcacgtattctgtgggatattgttgcgtagatgcattttcaggtaatgactctgtcatcgcccgtaattcatcctgatgacgccccgccagtttatagatataggcttctgcgagtaaattggctttgtccggtgctccagagttaagctgcttaagtttaaccagcgcagtatcatagtgaccagcatctgccagggttaaaatttgtccccgttgataatccttattttgcggctccagagagagcgccttttgccacagtgtaagcgagttttgccattgttgcaggttacgataagcgacggcgacagctgcataaccacgcgctggtaattgctgatgacggtagcggttgtaaacggtaataacctgtttatcttgcccggcccataaggcaatctgtaaccagtcagcaatttggttattgctgagtgctgattttagtgcaaaccatgacaaagctggctgagtattacccttgcgagcttcaataatcaatgcatcataggcgttattaacagcactcttcgccgcgggactcgctgctaaaaatgcggcagtaagaagtttcaaagcccatttggttttcgggcacctttttctgctacttgaatacatcctgtattactccatgtattgccaaaatctctctctgtatctaattacaggtaactgaaaagaaagatatttttgcacctcataatccgttattaaacgcggaagagagacgtgaattgttgatgatgagaagaagaaatgatgagcagagtgtccatataaaatccttttctcgcccgaaaatccattccaatgatgaggatcttcaggaatacggcataaatcccaatgcctttttcaaaataaattaggatgatgctgccaacttactgatttagtgtatgatggtgtttttgaggtgctccagtggcttctgtttctatcagctgtccctcctgttcagctactgacggggtggtgcgtaacggcaaaagcaccgccggacatcagcgctatctctgctctcactgccgtaaacatggcaactgcagttcacttacaccgcttctcaacccggtacgcaccagaaaatcattgatatggccatgaatggcgttggatgccgggcaactgcccgcattatgggcgttggcctcaacacgattttacgtcacttaaaaaactcaggccgcagtcggtaacctcgcgcatacagccgggcagtgacgtcatcgtctgcgcggaaatggacgaacagtggggctatgtcggggctaaatcgcgccagcgctggctgttttacgcgtatgacaggcttcggaagacggttgttgcgcacgtattcggtgaacgcactatggcgacgctggggcgtcttatgagcctgctgtcaccctttgacgtggtgatatggatgacggatggctggccgctgtatgaatcccgcctgaagggaaagctgcacgtaatcagcaagcgatatacgcagcgaattgagcggcataacctgaatctgaggcagcacctggcacggctgggacggaagtcgctgtcgttctcaaantcggtggagctgcatgacaaagtcatcgggcattatctgaacataaaacactatcaataagttggagtcattaccccctsagcagattatctaatttactggtgaaatgcatagactcatt

SEQ ID NO: 138 - DNA, 206880 bp, Escherichia coli
gatgcatgatttcggatttttcgaaagtcctgatgaaaggctgcgctacggcactcacggatttaattgttattcctaatgtatctatgaattaatgttttataaggattttctataaccatttataagtattttcaagcctggcttgttgcaaacaatgtataaagcacttaggcaataataattacattcagcaactatcatcatcggtattgtttgtgggcggaatttcatattgacaacagtacagttcttatatctattaataatagaaagggatctacaacctacagattggtgtagctttatggaaaaagactatttgagaattagtagtactgtattagtgagcttattgtttgggcttgctttggttttggtgaatagttggtttaatcagccaggcgttgaggaagttgttccacgatcaacctatctgatggtaatgattgctttattttttatcgatgctgttgcatttatttttatgcagttgtatttcatttatgaccgtaggcaattttcaaactgtatacttagtttggcttttctgagttgtttgatttactttgttaaaaccgtcattatcattcagcaaattattgaggggcgtttgacaagcagtgttgtccaaaatgacattgcaatctattatttgtttcgtcagatgagtttgtgcatattaatatttctggcattggtgaataaagttagtgaaaacacaaaacagcgcaatttattttccaaaaaaatgactttgtgcataagtttgttttttgttttttgtttttggggggccgatagttgctcacatactttctagtcattatgagagctacaatttacacattgccgagttaaccaatgaaaatggtcaggtggtttggaaagcctcatatgttaccataatgattttcatgtggttaaccttgctttcggttaatctatactttaatggtttacgctatgatatctggaatggagtgacggtgattgctttttgtgccgtactgtacaatatctctctgttatttatgagtaggtatagcgtgtccacttggtatattagtcgcactattgaagtagtcagtaagttaactgttatggtaatatttatgtgccatatattcagtgcgctacgagtaacaaagaacattgcacatcgcgatcccttaaccaatatatttaacagaaattattttttaatgaactgacagttcaatcagcatcagccaaaaaacgccttattgcgtcatgattatggatatcgaccacttcaaaaaagtcaacgacacctgggggcatccggttggcgatcaggtgataaaaacagtggtgaatatcattgggaaaagcatacgaccagatgaccttttagcgcgcgtcggcggcgaagagtttggcgtcttgctgacggacatcgatactgaacgtgcgaaagctttagcggaaaggattcgggaaaatgttgagcgtttaactggcgataatcctgaatacgctataccacaaaaagtgacgattagtattggcgctgttgtgactcaggaaaatgcgttaaacccgaatgagatctatcgactggctgataacgcactttacgaggcgaaagagaccgggcgtaataaggtggttgtgagggatgtggtgaatttttgtgagtcaccataaagcggcattttgatcctacccacgtaatatggacacaggcctaagcgaggttcttgttttcaaattgttccggactgaggccgccacaccaactgtgccgccgccaccgattgtaatcacattcgatataattaaacaccgttgcccgcattatttcccggctgataaagtgttctccatggatacattccactttcagcgaatgaaagaagctttccacgcaggcattatcgtagcagcaaccttttgcgctcatacttccacgcagattatgccgcttcagttgcgcctgataatctgctgaacagtactggcctccacggtccgtgtgaacgataacgttccggggcctcttacgccgccacagcgccatctgcagggcatcgcaggccagttgcgccgtcatgcgtggcgacattgaccagccaataacggcacgtgaccacaggtcaatgaccactgccagatacagccagccttcatctgtacgtaagtacgtgatgtctcctgcccacttctggttcgggccactggcgtaaaaatcctgctccaacagattttctgacacaggcaggccgtgtgcgcggtagctgaccgggctgaacttccgggaggcctttgccctcagtccctgacggcgcaggcttgccgccacggtttttacgttaaaggggtaaccctgagcacgcagttcatccgtcaggcgtggggcaccgtaacgctgttttgaccgggtaaaagccgcgaggacaacgctgtcgcagtgttggcggaactgctgacgcgtgcttatccttgtccgccgctgacaccacgtataccagccgctgcgggccacccggagcacgcggcacattgctttgatgctgaactcagcctgatgtttttcaataaagacatacttcatttcaggcgcttcgcgaagtatgtcgcggccttttggaggatagccagctcttcatcccgttctgccagctggcgtttgagacgtgcaatctcggtagacatctccagttcacgttcagaagacgtctgctgattttgctgtttactgcgccagttgtagcgctgtgattcatacaggctgagttcacgggctgcggcagtaacaccgatgcgttcagcaagcttcagggcttcactgcgaaattcaggcgaatgctgtttacggggttttttactggttgatactgttttgtcatgtgagtcacctctgactgagagtttactcacttagccgcgtgtccactattgctgggtaagatcaggcggttaaaggcatcaaccgcgaacaactgcagacgatgattacggaatcaggcattgcgctggatattagctgtgataacacgccgcgccagcaggttattgggggaacgcaggctgcgttgaatgaatttgccacgctgctgatggccgctggatacgaaccggttaaactcggtgtgagcggtgcctggcacacgcgtttgatggaagacggcgttcaggcaatgcgcgattatcttgccggactggatatcgcttcgccagagcatcaggttctgatgaacgtaacagcaaaaagcgaggtcgctccgtcaattatcaaagaaaatctctcattacacttaactcatacggtgaaatggactgaatctttcgatacatttctgaatatgccaaccccggtagctttccttgaaataagtaataagcctatttggggaatatgttaaatgattttgctggcgtggttcagcaacgagttatgcattgtcgtaaagcatttagtgatgcaaaggtattcaaatgattcctgattatttaacttttattcgctttcaggataaacgaaatctgatatacatttatgctattggacttattctgataggcttttattggaagaatgcagggtttacttttccatcagaggatattggtgtagttagtgggattctggccctggtgctgtataattttatttttgatctcaaggcgtactgggcttataaatgcgtcacgaagaatatcgatttttcgtggtttaagaaaaagcagaaccacaaaatagaattatttcttacacaacctctggtggcaggatttctgtcgttaatcatgttgagtgcaatgagttgggggctataccagcttctaccctcgttatatgcgctgttcctgatttcgttacttgggccgttggtcatctttctgctgtttcggatgatccgcaccagttatgtcaagcaggtcgctatttcagtagcgaaaaaagtaaaatataaaagtctgactcgctatgtgctgctttcggtgtgcatctcaacggttgttaacctgcttactatcagccgttgcgtaacagtgattcttttgtgacagaggggcagtggttaacgtttaaatcgataattgcattgctcattctttgtggcgtagtgttggcgattaatctgttttttctgcgcttctccaagcggtacgcttttctgggcaggctttttttgcaggaaatcgatctgtttttctccagtgaaaatgcgttgtcgaccttttttgccaagccgctttggcttcggttattcatattgctggttattgaaatgatgtggattacgctggtgtcggtattggcaacgcttgtggaatggcggatttggtttgaagcctattttttactctgctatgtaccgtgcttaatttactattttttccattgtcgattcctctggcataacgattttatgatggcatgtgacatgtatttccgttgggggcattttaataagtgaggaagttacaggaagtgaccagataacgcatatatgttctctactatcttgcgcattttgattgttgactgagtaaccagacagttgatgtgcacaatttcccctcgccctaacagacgtgggcgggggcacccggtgtgtgcaatatacgaaaaaaaagcccgtactttcgtacgggctcttctttaaatatggcggtgagggggggattgactcgcttcgctcgccctgcgggcagcccgctcactgcgttcacggtctgtccaactggctgtcgccagttgtcgaaccccggtcggggcttctcatccccccggtgtgtgcaatatacgaaaaaaaagcccgtactttcgtacgagctcttctttaaatatggcggtgagggggggattcgaacccccgatacgttgccgtatacacactttccaggcgtgctccttcagccactcggacacctcaccaaattgtcgttcctgtcttgctggaacgggcgctaatttagggaaatcatgacctgaggtcaacaaactttttgaaaaaatcgcgcgtttattcaaacttcaatcaatgtgtggttttaataagcgaaatctgcttttttgccaccgaccacggatttgttatgctggtggcctttgtagatcataacgataagtgcgaataaatttcgcacaacgcttttcgggagtcagtatggatatcatcttttatcacccaacgttcgatacccaatggtggattgaggcactgcgcaaagctattcctcaggcaagagtcagagcatggaaaagcggagataatgactctgctgattatgctttagtctggcatcctcctgttgaaatgctggcagggcgcgatcttaaagcggtgttcgcactcggggccggtgttgattctattttgagcaagctacaggcacaccctgaaatgctgaacccttctgttccactttttcgcctggaagataccggtatgggcgagcaaatgcaggaatatgctgtcagtcaggtgctgcattggtttcgacgttttgacgattatcgcatccagcaaaatagttcgcattggcaaccgctgcctgaatatcatcgggaagattttaccatcggcattttgggcgcaggcgtactgggcagtaaagttgctcagagtctgcaaacctggcgctttccgctgcgttgctggagtcgaacccgtaaatcgtggcctggcgtgcaaagctttgccggacgggaagaactgtctgcatttctgagccaatgtcgggtattgattaatttgttaccgaatacccctgaaaccgtcggcattattaatcaacaattactcgaaaaattaccggatggcgcgtatctcctcaacctggcgcgtggtgttcatgttgtggaagatgacctgctcgcggcgctggatagcggcaaagttaaaggcgcaatgttggatgtttttaatcgtgaacccttaccgcctgaaaatccgctctggcaacatccacgcgtgacgataacaccacatgtcgccgcgattacccgtcccgctgaagctgtggagtacatttctcgcaccattgcccagctcgaaaaaggggagagggtctgcgggcaagtcgaccgcgcacgcggctactaataaagcatcaggattcctgctatccttggcgggaattgaatacaggagagagttatgtatcccgtcgaccttcatatgcataccgttgccagcacacatgcatatagcacattgagtgattacattgcccaggccaaacaaaagggcattaaactttttgcgatcaccgatcatggcccggatatggaagatgctccgcatcactggcacttcattaacatgcgtatctggccgcgagtggttgatggggtagggatcctgcgcggcatcgaagctaacattaaaaatgttgatggtgaaattgattgcagcggtaaaatgtttgactcgctggatctgattattgccggttttcatgagccggtttttgcaccacatgacaaagcgaccaatacacaagcgatgatcgccactatcgccagcggcaatgtgcatataataagccatcccggaaatcccaaatatgaaatagatgtgaaagccgttgctgaagcagccgcgaaacatcaggtggcgctggaaatcaataattcttcatttttacactcacgtaagggcagtgaagacaactgtcgtgcggtagccgcagcggtacgtgatgctggaggttgggtggcattaggctcggattctcacaccgcgtttaccatgggggaatttgaagagtgtcttaaaatcctcgacgcggtagattttccgccagagcgcattttgaatgtttcgccgcgccgcttactgaacttccttgaatctcgcggtatggcaccgattgcggaatttgcagacctttaattactagtaatggaaatatattaatgaacgagttttctatcctctgtcgtgtgctgggttcgctctattaccgccaaccgcaagatcctttactggtgccgctgtttaccctgattcgtgaggggaaactggctgcgaactggccactggagcaggatgagttactgacgcgtttacagaaaagctgtgatatggcgcaagtctctgccgattacaatgcgttgtttatcggcgatgaatgtgccgtgccgccatatcgtagcgcatgggttgaggacgcaacggaagcggaagtgcgcgcttttctttccgaacgagggatgccactggcggatacgccagccgatcacatcggcacattgctgcttgcggcttcctggctggaagatcagtcaacggaagatgagagcgaagcactggaaacactgttcagtgagtatctgttaccctggtgtggtgcgttcctcggcaaagtggaggcccatgcaaccacgcctttctggcgcaccatggcaccgctaacccgtgatgccattagtgcaatgtgggacgagctggaagaagattctgaagagtaaatgtgatcatcgtcactcataactgcaacagataatttgttgttgcataaaatgtgtgctcgatctcattcatggccgcgttttctgctatcatgcgcggcatgaacatacttctctctattgcaatcacaacaggcattctctccggtatctggggatgggtggctgtttccctgggcttactaagctgggcgggcttcctgggctgtacggcctactttgcctgcccgcaaggtgggctgaaagggctggcgatctccgctgcaaccctgcttagtggcgtggtgtgggcgatggtcattatttacggtagtgcactggcaccacatctggaaattctcggttatgtcataaccggtattgtcgcgtttctgatgtgtattcaggccaaacagctgctgctttcatttgttccggggacgtttataggcgcatgcgcgacgtttgccgggcagggtgactggaaactggtgttaccttcgctggcgcttgggctggtatttggttacgcaatgaaaaacagcggcctgtggctggcggcgcgtagtgcaaagacggctcaccgtgagcaggaaatcaaaaataaagcgtgaggggcactcacgctttcgcttaaacagtaaaatgccggatgataattccggctttttatctgtcaggattccggtggaaccgacatatggcggtatttcaccagaatgtcgttctgccgttctgctttgttctgcaaatcccacagaccacggtcgataccatcattaatcaggaaaatgacccctgtttcgatagccgacatcagacacagcataacgggttcgtttgaggtgtaacccacttccccttccagcaagcgctggtagtcaataaagcggaaaaccccggcctgaacttcataggaaagtatcgtcttactggtgttcaccgaggagaggatctcaccggtactcacattgacgacgcgcaggttcacggcaatctgatcgagctggtattgcgtgtctgcaccgatcccaaaatatcttgccccaacaccgcccgatttaacgttgctttcataaccgataatcgaaccttcaaccataatatttgccgccgttaaagattgcagcgggattcggttattaatggcaaccgtgccgttttcttgtgccgcacgaataatcttgcgctcgttaagcaggttttgtaagccctggcgctccagcggtataaaccagcgagaatctttcaatgccgtgaccagcattgccgtggcgctttgcggaacagcagtggagaagttacttgccgggtagggtttaaattgcccggtttcgtcctgaatgttgtataccgaaacaaagatcttacccgtcggcgctggcagatgggtcaaatctttgtagctctgagctcgaggcattaatgtcggtctggcggcttctttaggcggggcggttaagcatccgctcagtaacatgacggcaaccaaaagaaataagcgctgcatgattattttccttatgaagctggggcttaaaaatcggttgagttattttgtaaacccgaaacctggatggtcgaggtttgtccggttttacgatctgtcacgttcaactgcaattgaccatcgcggttagcaatatcaacaatataatcgttggtcaccatgcggcccggtttaccggtattaatattcgacagtagcccacctaaaatttgtgactggatggcctgagtaaagttatctaacgctgagggtgtttcaataccaaagtcatcgttatagctcggatctttataagagttttgggcctgagcgctatttaataaaaaagcgccattatttgggttaccaccaaagtttggattacggaactggaaagtcatggttccagcccaacttaatggcgaaataagcatgagtagaactactgcatgtttgacacgcattgcagcctccgaacaattttttatttagaattcatcatgcgccaaatcgcccgtacttaataacgcctgatttatctggcgacgatttagtgcttcttcagtttgaatcagtgcaaagacgacagttttctcgaagtctcttttcaacggaaataaaaaagtctggaaaataacgtcctgattgaccgttatagtgatccagcttccccatcgtgcactgggcctttcattaatcgttaagttacccgtatagtcactttcccatttatcactaaaggctcggtaaaaatcatggccaatagatgaaacagtatggtcagttaacaatcccgggacttctacctcaacggcgtgaagattccctgcggcgaacagaaattctgccgccacaatccagcgtaaataacgtttcatggctttatcgcctgaggttatcgtttgcccaggaaaccgcttgtgtccggttttttacggctatcttcttgaaaagattataaagatgcgttttaaccgtattttcgctgatgaacaacgaacgagcgatctcgttattagacgcgccgatacgcagcttattcaggatctctttttcccgatgagtaaggagggctgattccgtgctgttataacgatagttaccagaatgtgtaatcaggtaactggcaagcttttgcgtaaagtagcattcgccgcgcaggacgccttgcaacccattgacaacacgttcttgatcctccatggcataaaaaacgccgttgatatgaggccagttttcaatgtcgcggtacgggtaatcttcaggcgtatttagcaacaatattttgatattgttgtttttcctgctcaaagtatcctgccaataatggataagctttttatctgcttccatcatatccagaagaataatagagcctgaagatatatcgtccagagaacgttgaatattatgtaattttcctgtaattgccagcgattgtttaaggtgctgcaagagagctgtcgcttgcaaagacggtttagtgatcaacaataatgtatgaccatgaatactatggacttcattaaacatgatgaaaccccgctttttttattgatcgcacacctgacagctgcctctaaaatagaagcaccagaagtactgacagatgttgcactgctgtgtgtagtaataaatcagccctaaatgggtaaaatataaaactaatggattacatctgatttcaatctagccattacaaatcttaaatcaagtgttaaacatgtaactaaatgtaactcgttatattaaaatgttaatcttaaggttttattaagtttagaaatgatagaaaagttgtacatttggtttttattgcacaattttaaaaaatcatacaaatggtgataacttactaataatacatataaaaaatatttcggtgtagtcctttcgtcatgtaaaacgttcttgttttttctccgcacctccgtggacaattttttactgcaaaaagacgaggtttgtcacggcttgtgcgcaagacatatcgcagcaatcagcgacgggcaagaaaaatgactgtctggtgatttttgatagcggaaaacggagatttaaaagaaaacaaaatattttttgcgtagataacagcgtatttacgtgggttttaatactttggtatgaacaaaaaaagaaaaatacaacgcgcgggtgagttattaaaaatatttccgcagacatactttccatcgtaacgcagcgttaacaaaatacaggttgcgttaacaaccaagttgaaatgatttaatttcttaaatgtacgaccaggtccagggtgacaacatgaaaaacaaattgttatttatgatgttaacaatactgggtgcgcctgggattgcagccgcagcaggttatgatttagctaattcagaatataacttcgcggtaaatgaattgagtaagtcttcatttaatcaggcagccataattggtcaagctgggacgaataatagtgctcagttacggcagggaggctcaaaacttttggcggttgttgcgcaagaaggtagtagcaaccgggcaaagattgaccagacaggagattataaccttgcatatattgatcaggcgggcagtgccaacgatgccagtatttcgcaaggtgcttatggtaatactgcgatgattatccagaaaggttctggtaataaagcaaatattacacagtatggtactcaaaaaacggcaattgtagtgcagagacagtcgcaaatggctattcgcgtgacacaacgttaatttccattcgacttttaaatcaatccgatgggggttttacatgaaacttttaaaagtagcagcaattgcagcaatcgtattctccggtagcgctctggcaggtgttgttcctcagtacggcggcggcggtaaccacggtggtggcggtaataatagcggcccaaattcagagctgaacatttaccagtacggtggcggtaactctgcacttgctctgcaaactgatgcccgtaactctgacttgactattacccagcatggcggtggtaatggtgcagatgtaggtcagggctcagatgacagctcaatcgatctgacccaacgtggcttcggtaacagcgccactcttgatcagtggaacggcaaaaattctgaaatgactgttaaacagttcggtggtggcaacggtgctgcagttgaccagactgcatctaactcctccgtcaacgtgactcaggttggctttggtaacaacgcgaccgctcatcagtactaatacatcatttgtattacagaaacagggcgcaagccctgttttttttcgggagaagaatatgaatgcgttattactccttgcggcactttccagccagataacctttaatacgacccagcaaggggatgtgtataccattattcctgaagtcactcttactcaatcttgtctgtgcagagtacaaatattgtccctgcgcgaaggcagttcagggcaaagtcagacgaagcaagaaaagaccctctcattgcctgctaatcaacctattgctttgacgaagttgagtttaaatatttccccggaagatcgggtgaaaatagttgttactgtttctgatggacagtcacttcatttatcacaacaatggccgccctcttcagaaaagtcttaatttgttgaaatatcgagcataagatgaatctggagagaatggtctgctgcgaatcagccaacctgaaagtatggataacacaaccctcaaggatgactaatcattgaggaaatagaataaatgttcagaccttttttaaactctcttatgctcggcagtttgctttttccttttattgccatcgcaggaagcaccgcgcaaggggggggatccatttttatggccaaattgtggaaccggcatgtgacgtcagcacccagtcatcacccgtagaaatgaactgcccacagaatggttctgttccgggcaaaacctattccagcaaagcgttaatgagcggtaatgttaaaaacgcgcaaatagcctcagtaaaagtgcagtatcttgataaacagaaaaagctggctgtaatgaacatcgaatataactaagtttctgaacaacgcacgttgctgagcagaaaaatgcgatttaaccaaaaagcctgctgtacacttaagaaacaagaaggtgtaaggaggcgttatgaaaacgcgtattcatgttgtgcagggtgatattaccaaactggccgttgatgtgattgtgaatgcggctaatccgtcattaatgggaggcggcggcgtcgatggggccattcatcgcgcagcgggtccggccctgctggatgcctgtttaaaagtcaggcaacagcagggcgattgccctacggggcatgccgttattacgcttgcaggcgctcttcccgctaaagccgtagtgcacaccgtcgggccagtctggcgtggtggtgaacaaaacgaagaccagcttttgcaggatgcctatctcaatagcctacgactggtggcggcaaacagctatacgtcagtggcttttcctgcaatcagtactggggtttatggttaccctcgtgcggcagcggctgaaatcgcagttaaaaccgtttcagaatttattacccgtcacgctttacccgaacaggtatactttgtctgttatgatgaagaaaacgcccacctctacgaaagactccttacccaacaaggagatgaatgatttgccccggctggcgagcgcggtgctgccactgtgttcgcaacatcccggtcagtgtggtcttttccctctggagaaaagtctggatgcgtttgccgcccggtatcgtctggccgaaatggcagagcatacgctggatgttcagtattacatctggcaggacgatatgtcgggtcggttactgttttccgccctgttagccgcagcaaagcgtggcgttcgcgtccgtttgttgctggacgacaacaatacgcccggacttgacgacattttacgcttgcttgacagccatccccgcattgaagtccggctttttaatcctttctcgtttcgcttgctgcgtccgcttggttatatcaccgacttttcccgtctcaatcgccgtatgcacaataaaagtttcactgtcgatggcgtggtgacgctggtaggggggcgaaatattggtgatgcctattttggggcaggggaagagccacttttttcggatttagatgttatggcaatagggcccgtggtagaggacgttgccgatgatttcgcccgctactggtattgcaaatcggtttcacccttacagcaagtgctggatgtcccggaaggtgaaatggcggatcgcatcgagttacccgcctcctggcataacgatgctatgacgcatcgttacttacgcaaaatggaatccagtccgtttataaatcatctggttgatggaacgttgccgcttatctgggcgaaaacacgtttattaagtgatgatccggcgaaaggggagggcaaggcaaaacggcattcactgttaccgcagcgcctgttcgatatcatgggctcacccagtgaacgcatcgatattatctcttcctattttgtaccgacacgcgcaggtgtggcgcaactcttacggatggtgagaaaaggggtaaagattgcgatcctaaccaattctcttgccgctaacgatgttgctgtcgtccatgccggatacgcgcgctggcgcaaaaaattgctccgctatggcgtggaattatatgaactcaagccgacgcgtgaacaaagtagtacgttacacgatcgcggcataaccggtaattccggagccagcctgcatgctaaaacctttagcatcgatggtaaaacggtgtttatcggctctttcaatttcgatccgcgttcaacattgctcaatactgaaatgggcttcgtgatagagagcgaaacgctggcacagttaattgataaacgctttattcagagccagtatgatgcggcctggcagctccgtctggacaggtggggacggatcaactgggttgatcgtcatgcaaagaaagagattattctcaaaaaagaacccgccaccagtttctggaagcgggttatggtcagactggcgtcgatattgcccgtggaatggttattgtaaatgtggcttaacgggctggtgctttatcgttctcacgcttaacaaccggtttaccagaaaacaaaaacttcagtaacgggatgcgtaaatgaatttcatacagaattatcgcaatccctactacgaatatcaggccacagagaaaaccaagccagttggaggtgatgtgcggtgtaatgtatgcgccgaaaaacagcgttaacgggtggtgaaccagatagataaatagcgatgcgttaacaaaataagtcacccgcgctgactggaagttaagcaaacggtggccaaaggagaagaccacattcaccatccacagaccgaggaccatggtgatcactgactcggtttcgtacatccaggcatcgccactgccatagcgctggttgagtaaataagcgacaaacgccaatgctgcagcgagggtacagccacgagacggcgtggtaaacaaggctttaagatgagggaaaatgaaagccagtgcgccgaggataaagaacggtaaataaaatagcgtttgcatgacaataaaattgaacatgccattactcagaatgggcggatacacaataaaaatcgttcttcttattaccgcataaccgatgccgaggcataaaaaaatcaccgatagttttaccatcgagaattttttattcgttttatcagaattttctaaattatttctgatgcgcttaaatatccatacgcacagcgtcgtcatgactactaacaccagtaaaaaccacaggtgtgatattaattcccaggccaacgtattatatttgtcatacaatgacagcccaggccaactttccgcttttcctttgacatattgcagcataataaattgcggtaatgtcagtagggggatggctgttaacatcgggatacctacacgttcgacacgtactttccaccattttttcaagggatagcgtaaaaaaagcatgtaggaaaagtagccggatataacgaaaaatacctgcatgcggaacgagtggatgaagtcattaaaaagggtcagccacaatgatggttcggcgctattcacatgccatgtatggctcgaatagattaaagaaatatgaaaagggatccctaacaacatcagccaggcgcggatggagtcgaggaaatattcacgttgcgcgggtactggattcatatatggttaactaatctcggatttttcgtcttatccctgtcgggttatgcctttaggcttgttgccatagcgacaccgacctgaccgcgccaggcgcaggcttcaaggtttttatgcatagcatcatcgctaccactaaccagaatggaagcgtctgtaagacggttgataaataaaattgctggcaaaccctacacgaagtcgatgcttctgtctttaggagaagcacggaaagtgaaaacggttgcaatcagatgcttaatccatgagccagcgtgctgaacgataccgggattctgttgtcggaatggctggttatccattaaaatagatcggatcgatataagcacacaaagggggaagtgcttactaattatgaaacataaactacaaatgatgaaaatgcgttggttgagtgctgcagtaatgttaaccctgtatacatcttcaagctgggctttcagtattgatgatgtcgcaaagcaagctcaatccttagccgggaaaggctatgaggcgcccaaaagcaacttgccctccgttttccgcgatatgaaatacgcggactatcagcagatccagtttaatcatgacaaagcgtactggaacaatctgaagaccccattcaaactcgagttctaccatcagggtatgtacttcgataccccggtcaaaataaatgaagtgactgccaccgcagtcaaacgaatcaaatacagcccggattatttcactttcggcgatgttcagcatgacaaagacacggtaaaagaccttggttttgccggttttaaagtgctttacccgatcaacagcaaagataaaaacgatgaaatcgtcagcatgctcggggccagctatttccgcgtgattggtgcaggtcaggtttatggcctttctgcccgcggcctggcaattgataccgccttgccatcgggtgaagaatttccacgcttcaaagagttctggatcgagcgtccaaaaccgactgataaacgtttaaccatttatgcattgcttgactcgccgcgcgcgacaggtgcttacaaattcgtggttatgccagggcgtgacacggttgtggatgtgcagtcgaaaatctatctgcgcgataaagtcggcaaactgggggttgcaccgttaaccagtatgttcctgtttgggccgaaccaaccgtcgcctgcaaataactatcgtccggagttgcacgactctaacggtctctctatccatgccggtaatggcgaatggatctggcgtccgttgaataacccgaaacatttagcggtcagcagcttctctatggaaaacccgcaaggcttcggtctgttgcagcgcggtcgtgatttctcccgctttgaagatctcgatgatcgttacgatcttcgtccaagcgcatgggtgactccgaaaggggagtggggtaaaggcagcgttgagctggtagaaattccaaccaacgatgaaaccaacgataacatcgtcgcttactggacgccggatcagctgccggagccgggtaaagagatgaactttaaatacaccatcaccttcagccgtgatgaagacaaactgcatgcgccagataacgcatgggtgcaacaaacgcgtcgttcaacgggggatgtgaagcagtcgaacctgattcgccagcctgacggtactatcgcctttgtggtcgattttaccggcgcagagatgaaaaaactgccagaggataccccggtcacagcgcaaaccagcattggtgataatggtgagatagttgaaagcacggtgcgctataacccggttaccaaaggctggcgtctggtgatgcgtgtgaaagtgaaagatgccaagaaaaccactgaaatgcgtgctgcgctggtgaatgccgatcagacgttgagtgaaacctggagctaccagttacctgccaatgaataagacaactgagtacattgacgcaatgcccatcgccgcaagcgagaaagcggcattgccgaagactgatatccgcgccgttcatcaggcgctggatgccgaacaccgcacctgggcgcgggaggatgattccccgcaaggctcggtaaaggcgcgtctggaacaagcctggccagattcacttgctgatggacagttaattaaagacgacgaagggcgcgatcagctgaaggcgatgccagaagcaaaacgctcctcgatgtttcccgacccgtggcgtaccaacccggtaggccgtttctgggatcgcctgcgtggacgcgatgtcacgccgcgctatctggctcgtttgaccaaagaagagcaggagagcgagcaaaagtggcgtaccgtcggtaccatccgccgttacattctgttgatcctgacgctcgcgcaaactgtcgtcgcgacctggtatatgaagaccattcttccttatcagggttgggcgctgattaatcctatggatatggttggtcaggatttgtgggtttcctttatgcagcttctgccttatatgctgcaaaccggtatcctgatcctctttgcggtactgttctgttgggtgtccgccggattctggacggcgttaatgggcttcctgcaactgcttattggtcgcgataaatacagtatatctgcgtcaacagttggcgatgaaccattaaacccggagcatcgcacggcgttgatcatgcctatctgtaacgaagacgtgaaccgtgtttttgctggcctgcgtgcaacgtgggaatcagtaaaagccaccgggaatgccaaacactttgatgtctacattcttagtgacagttataacccggatatctgcgtcgcagagcaaaaagcctggatggagcttatcgctgaagtcggtggcgaaggtcagattttctatcgccgccgccgtcgccgcgtgaagcgtaaaagcggtaatatcgatgacttctgccgtcgctggggcagccagtacagctacatggtggtgctggatgctgactcggtaatgaccggtgattgtttgtgcgggctggtgcgcctgatggaagccaacccgaacgccgggatcattcagtcgtcgccgaaagcgtccggtatggatacgctgtatgcgcgctgtcagcagttcgcgacccgcgtgtatgggccactgtttacagccggtttgcacttctggcaacttggcgagtcgcactactggggacataacgcgattatccgcgtgaaaccgtttatcgagcactgcgcactggctccgctgccgggcgaaggttcctttgccggttcaatcctgtcacatgactttgtagaagcggcgttgatgcgccgtgcaggttggggggtctggattgcttacgatctcccgggttcttatgaagaattaccgcctaacttgcttgatgagctaaaacgtgaccgccgctggtgccacggtaacctgatgaacttccgtctgttcctggttaagggtatgcacccggttcaccgtgcggtattcctgacgggcgtgatgtcttatctctccgctccgctgtggtttatgttcctcgcgctctctactgcattgcaggtagtacatgcgttgaccgaaccgcaatacttcctgcaaccacggcagttgttcccggtgtggccgcagtggcgtcctgagctggcgattgcactttttgcttcgaccatggtgctgttgttcctgccgaagttattgagcattttgcttatctggtgcaaaggaacgaaagaatacggcggcttctggcgcgttacattatcgttgctgctggaagtgctgttttccgtgctgttggctccggtacgcatgctgttccatacggtcttcgtcgtcagcgcgttccttggctgggaagtggtgtggaattcaccgcagcgtgatgatgactccacttcctggggtgaagcgttcaaacgccacggctcacagctgctgttagggttagtgtgggctgttggtatggcgtggttggatctgcgtttcctgttctggctggcaccgattgtcttctcgttgatcctgtcaccgtttgtttcggtgatttccagccgtgccaccgttggtctgcgcaccaaacgctggaaattgttcctgatcccggaagagtattcaccgccgcaggtactggttgataccgatcggttccttgagatgaaccgtcaacgctcccttgatgatggttttatgcacgcagtgtttaacccgtcatttaacgctctggcaaccgcaatggcgaccgcgcgtcaccgcgccagtaaggtgctggaaatcgcccgtgaccgccacgttgaacaggcgcttaacgagacgccagagaagctgaatcgcgatcgtcgcctggtgctgctaagcgatccggtgacgatggcccgtctgcatttccgcgtctggaattccccggagagatattcttcatgggtgagttattacgaagggataaagctcaatccactggcattgcgtaaaccggatgcggcttcgcaataaaaacgtagttgcctgatgcgctacgcttatcaggcctacatcgttcctgcaatttattgattttgcaagattttgtaggttgggtaaggcgttcacgtcgcatctggcaaaaacaacgagccaataaaaataccggcgttatgccggtatttttttacggaagaggtatcaaatgcgtttaattgtggtgagcatcatggtgaccttgctgagtggctgtggcagcattattagtcgcactataccggggcaggggcatggcaaccaatattatcccggtgtgcaatgggatgtgcgtgactccgcctggcgttatgtcacaatccttgatctgccattctccctggtttttgatactttactgctgccgctcgacattcatcatggcccgtatgagtgattaacgttcatcccactcatcagctgctgcgcgtccttcctcggtatccagcggtggctcaagctgaaattccccctcgtcccattcatgtaatgtattctcttcctgccactcctggcggatctctatctcatcatagtcgccatcaaaaacactttgcgcggcttcaccgctaagcataggtaaacattcaccttcttccccttcgtcggcaaaaaactcaacttgccacatgatgtcgccgtcctgcaaaacgtatttttgggcattgaactgttgcacattcgcgtcttcggcgtcgatgccggggttgtctgcaagaaattcttcgcgtgcagcgtcaatggcttcttcaagcgttgcgtacatggtcatcacgattctccctttgagttgatgaggtttcagggaaaaggatagctgattctccgcttttgcaagtatgaaaggcgaaaaatcagttcgatacctggggtattcgacgacgacgtagactgttccatgaatagactgcgttgaataacactacgccagcggtgacgagaaataccgctctgaaaccgtagtttgctgaaatcgctgctcccatcaatggtccggtaacgttgccaatatcacgaaacgattggttatagctgaagatacgcccggcgatctggttgctcgagttataaactaatagtgtctgtacggcggggagtagtgcaccatcggcggcaccgagcaaaaaacgtaaaatcccaagttgcaatggcgtctgaacgtaagacattgggatcaacagcagtacagaaaagatcagcgccgtaatcaggatcttttcgggtccgattcgatcgccaagtttgccgagtcgtggtgcacttagcagagccgccacgcctggcaccgaggcgatcatgccactgataaaggcgacgttactgacgttacccgccagttcgcggacatacagcgtcagaatgggggcaattgagcctgtcgccacctggatgattaacgtggtgacaaacaggctgagtaccagtttcgggtttttaagtgatgtcaccacttcccgcatgtgcagcatctcttttttgctgaccggctggaattttctctgatgcagaacagggtgacgaaaaagcagagtatgagcacactggcggtaataaagaataccggacgtaagccgtagctatcggcgagcaggccgccagccattgggccgagcaacgcaccactaacgccgcctgtggagagcgtacccagcgcccagccgcttttattacgcggtacttgtgtggcgataagagcattagcgttggggacaaatccgccaagtaacccaagaagcgcccgtaggatcaaaaactgccagatattttgtgccagtcccatcaacaccatcacgatgcccatgccgagggcagagcgtaatagcatgagttttcggcctttacggtcggcgagtccaccccaaaacggtgaggcgatggacgaaaataaaaatgtaatgctgaagacaataccggaccacatattcagggcggagtgaccggtaactccaagctgctcaacgtagaggggtaggaagggcattaccagactgaaggcggcaccggtaagaaaacagcctagccaggcgacgatcaggtttcgtttccagtttataggggtgtcattttcacagggtgacatagcaatccgctgttggtgcgccaggcgcggtgaacataagaagaaaagataagcacactaattatgcgcccgacttccagggggcgcaatccagagagcttttatcgctaaatcagggggatttgctgtggtaatgccggatgccattctgaagcatccggcaggggagatttaatagcgtgaaggaacgccttccgggcgtgttttaaagcgacggtgtaaccacatatactgctctggtgccatcatgatgcatttttcgaccactttgttcatccacgcggcggtagtttcggcatcatccagtggcggagaacactctggcggcagcataatcaattgataccctttgccatctggcttacggcgtggaacgaagggcaccagacatgcgccggacatccgtgccagcatccaggttccggtcgtggtcgcagcctgctcaacggcaaataacgggacgaaaacgcttgagcgcgggccgtaatcatgatccggtgcgtaccagaccacttcgccttttttcagggctttaatcatgccttttaaatctttgcggtcgagcatcgatttatttgagcgcaaacggccccaggtttgtagccagtcaatcagtggattatcgttcgggcggtaaacgccaatccccggttcctgcataccaaactgccgcgcgcccagttccagtgtcagaaaatggatgccaactaacaggatgccgcgtttttgcgcctgcacgtcacgaatgtgttccatgccgatcactttagtccagcgggcgattcggcggtccggccagaaccacgccatgccggtttccatcaggcccatgccaacggattcgaaattcttcaccaccattttacggcgttcttgttcgctcatttccgggaagcacagttccaggttgcgatgcacaatttttgcgcgtcgtttcataaaacgtaacgccagttttcctaatccacaaccgaggcggtagataaccgggtagggcaattgcacgactaaccaaagtacgccaatacccaaccaggttaaccaataacgcggatgaagcagtgcggtggagaacttgggtagattcgtcatatcaatcctgtttttcaacctattcgggcaattgtatgtattgtcgcattttttcgcccgcaaccaaaatttgtggctgaagactgggcgaaattgccgcgcttgtaaataacaaataatttttaatgcgcaaatgtagcgtaaaatgtgtggatgttaattatcgataattgctatatcatgccgcggatttttactttcccatctcgcaggaaccgtacaccatgccagtgttacacaaccgcatttccaacgacgcgctaaaagccaaaatgttggctgagagcgaaccgcgaaccaccatttcgttttacaagtatttccacatcgccgatcctaaggcgacccgtgacgctttatatcagctgtttaccgcgctgaatgtttttgggcgagtgtatctggcgcatgagggcattaacgcgcaaatcagcgtacctgcgagcaatgttgaaacatttcgcgcgcagctctatgccttcgacccggctttagagggtttacgcctgaatatcgcgttggatgatgacgggaaatccttctgggtactgcgcatgaaggtacgcgatcgcattgttgccgacggtattgacgatcctcactttgatgccagcaatgttggtgagtatctgcaagcggcggaagtgaacgccatgcttgacgatcccgatgcactatttatcgacatgcgtaaccactatgagtatgaagtggggcactttgaaaacgcgctcgaaattccggcagataccttccgtgagcagctgccaaaagcagtcgagatgatgcaggcacataaagataaaaaaatcgtcatgtactgcaccggcggcattcgttgtgaaaaggccagtgcctggatgaaacataacggattcaacaaagtctggcatatcgagggcggaattattgaatacgcccgtaaggcgcgcgagcagggcttgccggtgcgttttattggcaaaaattttgtttttgacgagcggatgggcgaacgtatatcggatgagattatcgcgcattgccaccagtgcggcgcgccgtgcgacagccataccaactgtaaaaatgatggctgccacctgctgtttattcagtgtccagtatgcgcggaaaaatacaaaggttgttgtagtgagatttgctgcgaagaaagcgcgttaccgccagaagaacagcgacgccgtcgggcaggacgtgaaaatggcaataagatctttaataagtctcgtggacgtctgaatacaacactgggcattcctgatccaacagaataaatatcattgccggatgcgtgccatccggcaacatttcacgcttacttctgctgtacgccttccactgaaataatcagatccacttcctgagaagctggacctaaatctgtcttgatattgaagtccttgagcttaattttgccttcggcctcgaagcctgcacgtttaccaccccatgggtcgtcgccctgaccaattaatttcgcttccagcgtgacgggtttggttacgccattcagcgtcagatcgccggtaatatccagttcgtcaccgtctttcttcacgctggtggaggtgaatgttgcctgtggatattttgcggtattgaggaaatctgcactgcgaagatgtttatcgcgttcggcgtgattagtatcgacgctggtggtgttaattgtcacattcactttatcggcagccggattttttcgtcaaaggtaaaagtaccgtcgaaatctttaaaggtgccgtataaccagctatagccaaggtgctggatgcggaaattaacaaaggcgtgctgaccttctttgtcaattttgtaatcggcggcaaccgctgaaccggcagagaacatcagggacgcgaaggttaaaccaagcaggctttttttcattttttatactccatagtcagatgacgactttcccagcatgcgcttcagagtgtcgtctttatcgatgaaatgatgcttcagggccataaatccgtgcataacggacagtactacgacgctccacgcgagccaaaaatgcagggcaccggcaaagtctgcctgtgcgccagcgtcggcaagggtcgcggggacgtcaaaccagccaaaaacgctgatcggtttaccatcggcagttgagatcagatagccgctgatgccgatggcgaacagcaataggtacaatgcgagatgtccagcctttgcggcaagacgagtcatgggcgaataactcggcagcggacccggcggtggagatatgacacgccacagaacgcgaataaccagccccatcattaacaaaataccgatgcttttatgcagttcgggtgctttgtgataccagccatcgtaataactgagcgtgaccatccacagacctaaagcaaacatgccgtagacaataattgcgcttagccaatggaaggccgcagatataacaccatagcgttcaggggtatttgtgaatgacataagtgcatccaatacgaatttgcgagagaaagaaaatggcgtgtcggagaatgaattgcaacacaaaaataacaaattgaatgatatttatttttatttcaataattttgaattaataatgaaagaatcttcataagtttagtgggttcagcatcagagatgtctggtgagtgctgtagaagcaggaataatctcattcaatttttcacgccaaatgaaagggagattaaatatttgtcagtttatgtcagtgcggaaaactaaaaataaaacacatagatcagatccataattgccaacaatccccagagaaaaagataaagcatcagatgctcgcgaatattattgatgagatagtgcaacagccgacgcattaaatactcctgtaaaaacggcctcattctggaggccgtaatgatgattattggaagcgggaaagcctgaatggcgtcaaatcaaaatcgctttttttgtcttgcgcaaaatcggcagctatttcccctaaaactgacgcaaatttaaaaccgtgcccactcaggccggtaatgagcagtgtattatcgtggccgggtagggtatcgataataaaatcttcgtcaggcgaattatcataggtgcaggcagcgccgtacaggcagcaaccgatacccggcaatacattgcgcaagaacgggaaggcttccgaaccatcgctgaccacttccgcaaacggaacacgttcatccgctgaatggataacctggcctccgttatgtttgccaatcttcaacgcgtcgttttctgccggaaaaccataatattgatcgccattgggcagttcaccggtaaacgccgggaatttattcttcacgctatagcggccatcggcctgataccaggcaaatactttacgtacgggctggacaggcagctccgggagcaggtcttttacccatgttcccgcgcagacaatcgcttttttcgcctgatactcaccgtcaacggtttcaatagttacgccatcatcgtcatgacgaattgcggtgaccgggcagttgaacagttgcgcacagcccgcttccttcgccagttggatccaggttttaatcgccagttcgctgcgcaaaaaaccggaatcagtctcaaataagccgatgtagttgtccgggacgcgtatttctggccagcgggccataatcccttgcgcatcgagcttttcaacgttgagttgccactgttcggcgctgtgggcgacgttggcgagaaatgcggagtcagccgggccgaggttaatgacaccagagcgtacaaaaatgggatcatcttcgttgtggcgggaaagttcatcccacagcgtttgcgcgcggaggaccaacgggacatacttttcgccttcaccataagcatggcgaattaatcgcgtatcgccgtggtggctgccgtgttgatgcggtggcatatgggcgtcggtcattagcacgtttaaaccggcgcgggttgcataatacccggcggcagcgcctacggaaccgctgccaataatgatgagatcgtatttcatttttttctctctgctctcatggtttaagcagagtaattaactgaatgcagatatacaacccagaaatggtaaaggcaccggtgaggtgccttttgggtggatggtcatgtcatgttaatgacgccgatactcgtttaccgggaaatcaccggattcaattttggcgattcctgcttctaatatcgaaataaattgtctggcaacatcagtggttaaccagagcgtctgaccaacttcagtcccttcctgctcggacttatttggggtctggtagtgcaaacgcaacatcagcgcatcatagctatcaacggtgctgatgtcccaccctacgagcggatgagtctgaatgacttcattatttttttccatcatggccccctaattcgtgttactagacaacgttattcgaggttcaatgcgtttttatctgaagcaacttcagtataccaataagtaagggtattcaccgaatttttaaaggggggaacagataaatttctgcttttaagatttatatgaacaataaaacagcatgtcattcatatttttttagcatattgtgcaattattttgaggaagtgtagaaattttgtactcaaaatttgtaagtaaaataaaaaagccggggcgacccggcaaaaacaaaaatcactgcatattattcgctgacaaaccagtcatcggcgctttcccacgtttcctggagaatttcgctaatgcgctgtttatcttcttttgttgcgccaataaccgataaattattcgctgcggcataacgtaccgatacgtggccttcattatcaggaaacgcatactgaatacggcgggaaagttcgccagccagggcgtcaatagccccagctggcaatggagaagttttcgctatggtgacttcaattcgcataatagccccctgttgaatatactggttatttatacaggtaaaataacctaatgacaacaggaagctacaatttttattgtttaacggaccagcgtaccgtttccccggcgaggaatggcaccagggtgtcatcagtcagtgcgatgctttcagcaacctgttgctcttcacgtaccagttcgatgaatgtgtcgttgaccggcaagccatagaactgcgggccgtttacagaacagaatgcttcaaagtgctgcagagcattcatctcttcaaagacggtagcgtaactgcccagcgcggttggggcgttgaagcagcccgcgcagccgcaactgctctctttgcgatgacgtgcatgtggcgcagaatccgtaccgaggaatactcgattaaaaccgctggcgaccagttcacgcaatgcctgttggtgaatattgcgtttgaggatgggtaaacaatacaggtgcggacgcacgccaccaaccagcatatggttgcggttaaacatcagatgctgcggagtgatggtggcagccagccgttcatttccgtcacggacatagtcggcagcatctttggtggtgatgtgctcaaaaacgactttcagcgcagtcaggcgttggcgcagaggttccatcacgctttctataaagcgcgcttcacgatcaaaaatgtcgatatctgcatgtgtcacttcaccatgcaccagtagcggcataccgattttttccatgcgctcaagtaccggcatgattgcgtcaattgacgtcacgccgtggctggagttagtggttgcgtttgccggataaagttttgcagcggtgaacacgccttcgttaaatccgcgctccagctcattaggatccagcgaatctgttaaataacaggtcatcaatggggtgaaattgtgcccggcaggtacggcatcaagaatacgttggcgatacgccacggcagcctcaactgtggtcacgggcggagccagattgggcattacgatagcccgtccataaatttcgctggtatacggcacgacagtttttaacatgtcgccatcgcggaggtgaaggtgccagtcgtctgggcggcggatctttaatacctgggatggtgcagtcattaatctctatgctccggctgaagggatgtttttgccggacacaaaggataagcggaaacgtttccctttgcacgaaaaataaagggcgcgaatgcgccctcgtgattaatcagtaaatggaatgacaatttcgcctggcttcacttcaatgcctttcgccagttttttcgccattgcttcgccctggctgccatcttcgcgcaggacgtaagcaggttgctggttaaagtaattgcgtaatgcctggttcaaatagggaagcaacgtttgcatcaccgtttgcattttttccggttgtaccgtcgcatcgaccacttccatctctttcaggaagatcgcgcctttttctttatcaaacacgggcagcgctttcagcttcagtttcatggtcgctttctggctaccgaacagggagttcatgtccagattggcgtctccggttagggtaaccttattcggctcttcgcgaccaatttggctggtcaggtttgtcagaacaatatgggcgtcagccacgccgggtaaaccgatatcttttgagaaattattatgtttcgcaagcgactggttaatttcttgttcggtgatggtgtattgggtgagttgattacagccaacgagcaggccactgacgatcaatgcagcggcaaataaaaacttgttcatggtagtcctcgacatgaaatctgcgtcaatatcctgacacaacgcagcatgtgtcaccagcgataaactcaccagcagaaaaaactgaaaacggcggcaacccgcgaatacaggctgccgcggcgggtcaggattaaatcgccattgatgataacaaattgatttgtgtctgtttcgccatattatcgcggtaatcagcaacgcggcttggccagttgattccggctaccagcgtcagattacgtagtagcggaaatagctgaatatcatcttctgaaagttcgccattcacggcgttcggtttgacgatcagtttatccagcgcacgtaaatcatcgctgatattcttaatcagaccgtcagagtgggccagcaggtcggcaaaattacccgcgctggcctctttcttgtcgacgaaatatttgcgtgcggcgggagtagaaaactcatcaaatgccgatttggcaaaacgcggcaacagcagtttgttggcgtagccattgaccttgcgcagccactcttcaatggcaggggaacgtttgccggtcagtaacggtttgccgtcgagtttatcgacatagtgaacgatgtccatgctttctggcatatagcggctgtcatctttttgcagaatgggaacctgtttttgaccgaccatccgggtgggtgtttctgcgtcgtcgttgagcagaacatgtaattcgacggggatatttttcaggccgaaaatcatgcgggctttgaggcagtaagggcagtgatcgtaaatgtatagcttcacgtgactcctccatttggctgtcagttcactttcagtatggaggagtcaggggggagtatcaaatcaggcgtcgcgttcaagcaaacgacgcgcggcgcgtttctggctaaactgccaacccagcgcaaggaaagtgaagatgccaataatgcccagcatcatccacggaagctctggctggtgcgccgatttacccaggtcaaacagccagccgccaccgatataaccaatagcgccgccaatcgccagacccagacggctacaccccatatagctgccgcgagctcttgcgtccgccagcgaagcacttaaggtttcacgcgcaggctcggcaatgatcgacccgatataaaacagacaaatcagggtgaaaagttgttgcaggccgctgaccatgcccaccggcatcatgcttaatgacattatcaacagcccagccatcaaccggtgttccagacgaaaatgcttttcactccagcgggcgatagggtagagcaacgttaacgacagacacgcttcaatggcatacatccatttaacggcagagggcgcgccagccacgtcgttgaccataattggcagcatcagcatcacttgtacagccagcatgtagtaacccgccagcgtcaggacataggtgacaaaacgcttgtcacgcatcacgcgggtcatgccttcgcgaacgggcgtgcgtacggtggagagtttccatgctggtaacaaccacgcattgaacgctgcacacagcacaaacaaaacggcccctgtggcgcagaccaggcgaaagtcgtattgcaacagccagctccccaacaatgcgccaatgactgcaccggcactgtcctgcatcatcaacagcgagaaaaaacgaccacgctgttgtggacggattagtttcaccaccagcgccgaacgcggcggatcaaacaacgtgccgccgagtcccgagagcaggcatgaaaaccacaatagccacggttcgtgggcgatacccattgtggcgaatccggcagcgcgcatcagcataccggtaacaatcatcggtttggcaccaaagcggtcggcaattgcgccgccgaaaatacccagaccttgctgaataaactggcgtagaccgagagcaataccgaccatgacggcggcccagcccatttgatcaacgaagcggatagagatcagcgggaagacaacaaagaaccccagcacgaccagcatattatcgatgagcaggaaatatttacccaggttcctcgcctgcgacacgcgggacatttcccctcccgggaaataaaagatgagcactttctattctgcattgccgctaagacttttcccatcacttcggggacaatatttttttatcaaaacgtcgctttgatagagagtttttatcaaatatgtgaataatgcagaaaatggcattttggacttttcacagggtctggttgcgcaggtatagtaatacttacagcgtattaaagacgttacgggaaggagtaggtatagaatgtttggctatcgcagtaacgtgccaaaagtgcgcttaaccacagaccgactggtcgtgcgtctggtgcatgatcgtgatgcctggcgtcttgcggattattacgcagagaatcgccatttcctcaagccctgggagccagtgcgcgacgaaagccactgttatccatcaggctggcaggccaggctggggatgattaacgaatttcataaacaaggttcagctttctactttggtttattcgacccggacgaaaaagagattattggcgttgccaatttttccaatgttgttcgcggctcttttcatgcctgctatctcggttattcgattgggcaaaaatggcagggcaaaggactcatgtttgaagccctgaccgcagccattcgttatatgcagcgcacccaacatattcatcgcattatggctaattatatgccgcacaataaacgcagcggtgatttactggcgcgactgggttttgaaaaagaaggctatgcgaaagactatctgttgattgatggacaatggcgcgatcacgtactgacggcattaacgaccccagactggacgcccggccgctaaggagaatctcatgaaatatcaacttactgcccttgaagctcgcgtgattggttgcttgctggaaaagcaggtgaccacgccggagcaatacccgctctcagtcaatggtgtagtcacggcctgtaatcagaaaacgaaccgtgaaccggtcatgaatctgagtgaatccgaagtgcaggaacagctggataatctggtcaaacgtcattatctacgcacagtgagcggttttggtaatcgggtcaccaaatatgagcaacgtttttgtaattcagaatttggcgatctgaaactgagcgcagcggaagtggcgttaatcaccacgttgttattgcgtggtgcccagacgccaggtgaactgcgcagccgcgccgcgcgaatgtatgaattcagcgatatggcggaagtggagtcgacgctggaacaactggcaaatcgcgaagatggtccttttgtggtgcgtctggcccgcgaaccgggtaaacgcgaaagccgctacatgcatcttttcagtggtgaggttgaagatcagccggcggtgacggatatgtcgaacgcggttgatggtgatttacaggcccgcgtcgaagccctggaaatcgaagtggcagaactgaaacagcgtcttgattcgttgctggcccatctgggagattaaagtgaaaaaattacgtatcggcgtagtgggattaggtggcattgcgcaaaaagcgtggttaccggtgctggcggcagcgtctgactggacgttacaaggagcctggtcgcctacgcgcgcgaaagccctgccaatttgtgaaagctggcgcattccttatgccgattcgttatccagccttgccgccagttgcgatgcggtttttgtgcattccagcaccgccagccactttgacgtggtcagtacgttactcaatgcgggtgtacatgtctgtgtcgataaaccgctggcagaaaatctgcgcgatgctgaacggctggtggaactggcggcgcgtaaaaaactgacgttgatggtcggttttaaccgtcgtttcgcaccactctacggtgagttaaaaacgcaactcgctaccgcagcttcgctaagaatggataaacatcgtagcaatagtgtcgggccacacgatctttatttcacgttgctggatgattatctgcatgtggtggataccgcgctgtggttgtcgggcggcaaagcctctctggatggcggtacgctactgactaacgacgctggcgaaatgctgtttgccgagcaccatttttcggccggtcctttgcagatcaccacctgtatgcatcgccgtgccggaagtcagcgtgaaaccgtgcaggccgtgactgacggtgcgctcatcgacattacggatatgcgcgaatggcgtgaggagcgcgggcagggcgtagtgcataaaccgattcctggttggcagagcactcttgaacaacgtggatttgtcggctgtgcgcggcacttcattgaatgtgtgcaaaatcagacagttccgcaaaccgccggcgaacaggccgtgctggcgcaacgtatcgttgacaagatctggcgcgatgcgatgagtgaataaaccctgtaacatctggcggtagcaattcaccataatccaggtagactattcgcctctttcagcgcctgccttgcaggcgttttgcccgtgggtctggattagaacaccgatgaatttattaaaatcgctggccgccgtcagctcgatgaccatgttttcgcgtgtgcttggcttcgcacgagacgcaattgtcgccagaatctttggcgcagggatggcaaccgacgcctttttcgtcgcttttaaacttcctaacttgttacgccgtatctttgccgaaggggcattttcccaggcatttgtaccgattctggcggaatataaaagtaagcagggtgaagacgccacgcgggtctttgtctcttatgtttctggcctgctgacactcgcgctggcggttgtgacggtcgctggcatgctcgccgcaccgtgggtgatcatggtgaccgcgccaggcttcgctgacactgccgacaaatttgccctgaccagccagctactaaagattacctttccctatatcttgctgatctccctggcgtcgctggtgggagcgattctgaatacgtggaaccgcttctcgattccggcgtttgctccaacactgcttaacatcagcatgattggtttcgcgctgtttgccgcaccgtactttaacccaccggtgctggcgctggcgtgggctgttacggtcggcggcatcctgcagctggtgtatcagctaccgcacctgaagaagatcggcatgctggtcctgccgcgcattaacttccacgatgccggagcaatgcgcgtggtgaaacagatgggaccggcgatccttggcgtctctgtgagccagatctccttaatcatcaacaccatttttgcctcgtttcttgcttccggttcggtgtcttggatgtattacgccgaccgcttaatggagtttccgtctggtgtgctgggcgtggcgcttggcaccattttgctgccgtcgctgtcgaagagttttgccagtggcaatcatgatgaatacaaccgtttgatggactgggggctgcgtctttgtttcctgttggcgctgccgagtgcggttgcgttgggcattctttcaggtccgttgaccgtttcgctgttccagtacggtaaatttaccgcctttgatgcgctgatgacccagcgggcgttaattgcctactcggtgggtttgattggcctgattgtagtgaaagttttggctcctggcttttattcccgccaggacattaaaacgccagtgaaaattgccatcgttacgctgattttaacgcaattgatgaacctggcgtttattggtccgttgaaacatgccgggctgtcactttctattggtctggcggcgtgtctgaatgcttcgctgctttactggcagttgcgtaagcagaaaatctttaccccgcaacccggctggatggcgtttctgttgcgtctggtggtggcggtactggtgatgtctggcgtgcttttaggtatgttacatatcatgccggagtggtcattgggtaccatgccctggcgcttactgcgtttaatggcggtcgtgctggcggggattgccgcgtacttcgctgcactggcggtactgggcttcaaagttaaagaatttgcccgccggacggtgtaacaatgcattccggcctgcagtgcaggccggagataatattcagatcgaaatctttttaccgccgcgatgggttgttgaggtctgaccgttcgccccatatagcgtcggttcctgatgcggtttcaacatttccagcgcctgttgattgtgctcaatctgtccttccagtaaccagccgttatgttgattcatttggcgtagttgctgcgttttcacagtaatttcctgccagcgttgactaatatcaacgctatttgctgtattgggttctttcttgcgtaactgttcgaggtaatccagcgtcgccagcagtgagcttttttgttctgtaatccattgcaactggctgccgttgatctgccccatagagagatgttgctgctcttgatccattaccgttttgagatcgttaagcacagcggacatctggtcgaggatctctgcaagacgtgtcatacgatcagttactctgcaagtcttgctgcgcttcgttgatcagcgcatcggcaattttgccggtgtccatttttagttcaccgttacgaatcgccagttttaacgcttcgacacgttcaagattgatatcactgctgccgggttgcatcagttttgcttgcgcgtcgcttaacgtcacactggtgctggtggaggcggttgtttttgccgcccggctgttcgttaccggcgcgtcagtggtttcgcgcggttgaacggtgcttacaggcttcagaggcgaagtgcgatcaatactcatggtttattcctcattgagggcgcttttatcatgtgttgcttatttatcggcaagggacgggtaatctttaacagcttacaggtttataagaatattcccatctgcatcaacaacgccgctgactacctgtcccgataccatgcgcacccgcgcattctgtgcgacggctgcattgttcagcgcctgaccttctgcgttggcgctaaacccatcaccgctggcgatcacattgacgcgttgtcccgcttttacccgccatgcctggcgaaactgggttaactggataggttgatcgggtgatagatcgcgcaggctaatggcatcaacaagttgattgatatccagcaccgtacgcggtggcagggtatccagccgtccgcgttttagtttgacattgccagcttccagctttcctccccgcacaatgggcatcgcggcaaccacataatttcctgtggcctgcacattaacctgtaaatatcgtttgtcgttaccgcagcgtgccaacacattcacattgccccacaggcgggaattattgctcatcgaaagcaatggctgctcgcatggcggtagtagattgggcgctgtacgaatagaaacacgaacctcatcacttacccccgcgagttgggcgctaaaaaagttgtgcaattgcgatgtgagattgctcgccgtacttaacggactgaacagtatcgcgatgatcgccacgctacgttttattgtcagcattttcgcccccagccatttctacaacgtgaattgtacctgtccgcaatgaccatcaacggcataaatagcgacccattttgcgtttattccgccgataacgcgcgcgtaaaggcatttaagctgatggcagaattttgatacctgcggaggagatatgctcgataagctcgacgccgccttacgttttcaacaagaggcgctcaatctgcgcgcccagcgtcaggaagtgctggcagcaaacatcgccaatgccgatacccctggttatcaggcgcgcgatatcgattttgccagtgaacttaaaaaagtcatgcaacgtggacgggatgcaaccagtgtggttgcactgacgatgacctcaacgcaacacatcccggcgcaggcgctgacgcctcctaccgcagaactgcaataccgtattccggaccagccttcgcttgacggtaataccgtcgatatggatcgcgaacgcacccagtttgccgataacagcctgcaataccagatgagccttagcgcgttgagcgggcaaatcaaaggcatgatgaacgttttacagagcggaaattaacggatggcactgctgaatatttttgatatcgccgggtcggcgttaactgcccagtcccagcgcctgaacgtggcggccagtaatctggcaaatgctgatagcgtgaccggtcctgatggacagccatatcgggcaaaacaggtggtattccaggttaacgctgcaccaggtgctgcgacaggcggcgtaaaggttgccgatgttatagaaagtcaggccccggacaaactggtttatgaaccgggtaatccgctggcagatgcaaagggctacgtaaaaatgccgaacgttgatgtcgtcggggagatggttaacaccatgtcggcgtcacgcagctatcaggccaacgttgaagtgctcaacacggtgaaaagtatgatgctgaaaacccttacgctcggtcaataaaggagaaagctatgtccattgcggtaaccaccaccgatccgacaaataccggcgtcagtaccaccagcagtagttcgctcacgggcagcaacgccgcagatttacaaagcagttttctgactttgctggtggcgcagctgaaaaaccaggacccgaccaatccaatggaaaacaacgagctgacgtcgcaattggcacaaatcagcacggtcagcgggattgaaaaactcaataccacgctcggatctatttccggacagattgataacagccagtcgttacaggccagtaacctgatcggtcacggcgtgatgatccccggcacaactgttcttgcgggaaccggcagtgaagaaggggctgtgaccacgaccacgccgtttggtgttgagctgcaacaggcggcagacaaagttacggccaccatcaccgataaaaatggcgcggttgtgcgcaccattgatattggtgaactgaccgctggagttcacagtttcacctgggacggtacgttgactgatggcagcactgcgccgaacggttcttacaatgtagcgattagcgccagtaacggtggtacacaactggttgcccagccgctgcagtttgctctggtgcagggtgtgatccgcggcaacagcggtaatacgctggatctcggcacttacggcaccaccaccctcgacgaagtacggcagataatttaagccttcacatttcaggagtcagtcatggccttttctcaagcggttagcggattaaacgctgccgccaccaacctcgatgttattggcaacaatatcgccaactccgccacctacggctttaaatcaggcacggcctcttttgccgatatgtttgccggttcgaaagtgggactgggggtaaaagttgccggtatcactcaggactttaccgatggcacgaccaccaacaccgggcgaggtctggacgttgctatcagccagaacggttttttccgtctggtagacagcaacggttcggtgttctacagccgtaacggacaatttaagctggatgaaaaccgtaacctggtgaatatgcaaggtttacagctgacgggttacccggcaaccggtacgccgccgactattcagcaaggggcgaatccgaccaatatttcgatcccgaataccctgatggcagcgaaaactaccaccacggcatcgatgcagatcaacctgaattccagtgatccgcttcctactgttacgccattcagcgccagcaatgcggatagctataacaaaaaaggttcggtgactgttttcgacagtcagggtaatgctcatgacatgagcgtctactttgtgaagaccggggataataactggcaggtctacacccaggatagcagtgatccaacaggtacagccgagcctgcaatgaagctggtgtttaatgccaatggcgttctgacctcaaatccaacagagaatattaccactggcgcaattaacggcgcagatcccgccacgtttagcctgagcttcctcaactccatgcagcaaaataccggcgctaacaacattgtggcaaccacccagaacggctacaaaccgggcgatctggtgagttatcaaatcaatgatgacggtacggttgtcggcaactattccaacgaacaaacccaactgctggggcagattgtactggcgaactttgccaacaacgaaggtctggcatccgaaggcgacaacgtctggtctgcgacgcaatcttctggcgtggcgctgttggggacagccgggacgggcaactttggtaccctgaccaacggtgcgctggaagcgtccaacgtcgatctcagtaaagaactggtcaatatgatcgttgcccagcgtaactatcagtctaacgcccagaccattaaaacccaggaccagatcctcaacacgctggttaacttacgctaatcgctgacgggatagctcaatggatcacgcaatttataccgcgatgggagcagccagccagacgctgaatcaacaggcggtaaccgccagtaatctggccaatgcctctacgcccggttttcgtgcgcagttaaacgccttgcgcgcagtgccggtggaagggctttcactgcctacgcgcacgctggtaacggcgtcaacaccgggtgcagacatgacgcccggcaagatggattacacctcgcgcccgctggacgttgcgttgcagcaggatggttggctggccgtgcagaccgctgacggcagcgaagggtatacgcgtaatggcagcattcaggttgatcccaccgggcaactgacaattcaggggcatccggtgataggcgaggcggggccaattgctgtgccggaaggggcggaaatcacgatagctgccgatggcacaatctcggcgctgaatccgggcgatccggcaaatacggttgcgccagtggggcgtctgaagctggtgaaagccacgggcagcgaagtgcagcgcggtgacgacggcatttttcgtttaagcgcagaaacccaggccacgcgtgggcctgtactgcaggcagatccaaccttgcgtgtgatgtcgggtgttctggaaggcagtaacgtcaatgccgttgcggcaatgagcgacatgattgccagcgcgcggcgttttgaaatgcagatgaaggtgatcagcagcgtcgatgataacgcaggccgtgccaaccaactgctgtcgatgagttaattgaaaggatacatgacaagtataagttgcccgatgcgcaagtttatcgggtctatgggggcaatcgcaatttatcgattttgcgagcacttgtaggccggataaggcgtttacgccgcatccggcaagaagacatatgcactttgtcactaatccactacaggacattttatgatcagttcattatggatcgccaaaacgggccttgacgcccagcaaaccaatatggacgtcattgccaacaacctggcaaacgtcagtactaacggttttaagcgtcagcgcgcggtgtttgaagatctgctttatcaaaccattcgtcagccgggggcacagtcttccgaacaaaccaccttaccctccggattacaaatcggcacgggggtacgcccggtcgccactgaacgcttacacagccagggcaacctgtcgcagaccaacaacagcaaagatgtcgcgattaaagggcagggctttttccaagtgatgttgccagatggctcatcagcctatacccgtgacggctctttccaggtggatcagaacgggcagttggtgacggctggtggttttcaggtgcagccagcgatcaccattccggcgaatgcgttaagtatcaccatcggtcgtgatggcgtggtcagcgtaacccaacaaggccaggcagctccggtccaggttgggcagctcaatctcaccacctttatgaatgataccggactggagagcattggcgaaaacctctacaccgaaacgcaatcctccggtgcaccgaacgaaagcacgccgggcctgaacggtgcgggactgctgtatcaagggtatgttgaaacgtctaacgtcaacgtggcggaagaactggtcaatatgattcaggtgcaacgcgcttacgaaatcaacagtaaagcggtgtccaccaccgatcagatgctgcaaaaactgacgcaactctaaggcataaccggtggcaggttcaccggtttattgatttttgaagatgatagccatgcaaaaaaacgctgcgcatacttatgccatttccagcttgttggtgctttcactaaccggctgcgcctggataccctccacgccgctggtacagggagcgaccagtgcacaaccggttcccggtccgactcccgtcgccaacggttctattttccagtctgctcagccgattaactatggctatcaaccgctgtttgaagatcgtcgaccacgcaatattggcgatacgctgaccatcgtgttgcaggagaacgtcagcgccagcaaaagctcctctgcgaatgccagccgtgacggtaaaactaattttggctttgatactgtgccgcgctatttgcaggggctgtttggtaacgctcgtgccgatgtcgaagcctccggtggtaacacgttcaacggaaaaggcggggccaatgccagcaatacctttagcggcacgttgacggtgacggttgaccaggtactggtcaacggcaacctgcatgtggtgggtgaaaaacagattgccattaatcagggtaccgaatttattcgcttctctggcgtggttaatccacgcaccatcagcggcagcaataccgtaccgtctactcaggtggcggatgcgcgcattgaatacgtaggcaatggctacattaacgaagcgcaaaatatgggctggttgcaacgtttcttccttaacctgtcgccaatgtaagtgaggctgtggtgattaaatttctctctgcattaattcttctactggttacgacggcggctcaggctgagcgtattcgcgatctcaccagtgttcagggggtaaggcaaaactcactgattggctatggcctggtggtggggctggatggaaccggtgaccagacgacccagacgccgtttaccacacaaacgcttaataacatgctctcacagctgggaattaccgttccgacgggcaccaatatgcagctaaaaaacgtcgctgcggtaatggtgacagcgtcacttcctccgtttggacgtcaggggcaaaccatcgatgtggtggtttcctccatgggtaatgccaaaagcttgcgtggaggtacgttgttgatgacaccgcttaagggcgttgacagtcaggtgtatgcgctggcgcagggcaatattctggttggcggcgcaggagcctccgctggcggtagcagtgttcaggtgaaccaactgaacggtggacggatcaccaatggtgcggttattgaacgtgaattgcccagccagtttggcgtcgggaatacccttaatttgcaacttaacgacgaagatttcagcatggcgcagcaaatcgctgacaccatcaaccgcgtgcgtggatatggcagcgccaccgcgttagatgcgcggactattcaggtgcgcgtaccaagtggcaacagttcccaggtccgtttccttgccgatatccagaatatgcaggttaatgtcaccccgcaggacgctaaagtagtgattaactcgcgcaccggttcggtggtgatgaatcgcgaagtgaccctcgacagctgcgcggtagcgcagggaaatctctcagtaacagtcaatcgtcaggccaatgtcagccagccagatacaccgtttggtggtggacagactgtggttactccacaaacgcagatcgatttacgccagagcggcggttcgctgcaaagcgtacgttccagcgccagcctcaataacgtggtgcgcgcgctcaatgcgctgggcgctacgccgatggatctgatgtctattttgcaatcaatgcaaagtgcgggatgtctgcgggcaaaactggaaatcatctgatgatcagcgacagcaaactactggcaagtgcggcctgggatgcgcaatcactcaacgaactaaaggcgaaagcgggcgaagatccggcggcaaatatccgtccggtggcccgccaggtggaagggatgttcgtgcagatgatgttgaaaagcatgcgcgacgctttaccaaaagatggcctgttcagcagcgagcacactcgtctgtataccagtatgtatgaccagcaaattgcccaacagatgacggcgggcaaaggtctggggcttgcagagatgatggttaaacagatgacgccagaacaaccattgccagaggagtccacgccagcagcaccgatgaaattcccgctcgaaactgtggtgcgttatcaaaatcaggcgctttcgcagctggtgcaaaaggccgtgccacgtaactacgatgattcgctgccgggtgacagtaaagcattcctcgcgcaactctcgctgcccgcccaactggcaagccagcaaagcggtgtgccacatcatttgatcctcgctcaggcggcactggaatctggttggggcaacggcaaatccgccgcgaaaacggcgagccgagctataacctgtttggtgtcaaagcctctggcaactggaaagggccagttactgaaatcaccacgactgaatatgaaaacggcgaagcgaagaaagtaaaagcgaagtttcgggtctacagctcgtatctggaagcattgtcggattacgttgggctgttaacacgtaacccgcgctacgccgccgtgacgaccgccgcgagtgcggagcagggggcgcaggccctacaggacgcggggtatgctaccgatcctcactatgcccgtaaactcaccaacatgatccagcagatgaaatcgataagcgacaaggtgagcaaaacctacagcatgaacattgataatctgttctgaataactcaagtccggcgggtcgctgccgataatactctgtaattgaaggcttataaggaacctccatgtccagcttgatcaataacgccatgagcggactgaacgcggcccaggcggcgttaaatacggcaagtaataatatctccagctataacgttgccggatatacccgccaaaccactattatggcgcaggccaatagcacgttgggcgctggcggctgggttggcaatggcgtctacgtttctggtgtgcagcgtgagtatgatgcgtttattaccaaccagttacgtgctgcgcagacgcaaagtagcggcctgaccgcccgctatgagcagatgtcgaaaatcgacaatatgctctccaccagtacctcttcgctggcaacacagatgcaggatttcttcaccagcctgcaaacgctggtgagtaacgcggaagacccggcagcgcgccaggcgctgattgggaaatcagaagggttggtgaatcagtttaaaaccaccgatcaatatctgcgcgaccaggacaaacaggtcaatatcgcgataggtgccagcgttgatcagatcaacaattacgctaaacaaattgccagcctgaacgatcaaatctcgcgcctgacaggcgtgggggcaggggcgtcacctaacaatctgctggatcaacgcgatcaactggtgagcgaattaaaccagattgttggtgtagaagtcagcgttcaggatggtggcacttataacatcacgatggccaatggctactcactggttcagggaagtacggcgcggcaacttgcggcagttccttccagcgccgacccttctcgtacgactgtcgcttatgttgatgggacggcaggcaatattgagatcccggagaaattactgaataccgggtcgctgggcggcattctgacattccgttctcaggatctggaccagacgcgtaatacgcttggacaactggcgctggcatttgccgaggctttcaacacccaacacaaagccggatttgatgccaacggcgatgctggtgaagatttctttgctatcggtaagcccgcggttctgcaaaacacgaaaaacaaaggtgacgttgcgatcggtgccacggtaactgatgcctccgcggtactggcgacagattacaaaatctcgttcgataataatcagtggcatgtcacccgccttgccagcaataccactttttcggtgacgccggatgccaacggtaaagtggcatttgatggtctggagttgacgtttacaggaacgcctgccgttaacgacagcttcacgctgaaaccagtaagtgacgccatcgtcaacatggatgtattaatcactgacgaagcgaaaatcgcgatggcgagcgaagaagatgcgggtgatagcgacaaccgcaacggtcaggccctgctggatctgcaaagcaacagtaaaacggtgggcggtgcgaaatcttttaatgacgcttatgcctcgttagtgagtgatatcggtaataaaaccgctacgttgaaaaccagtagcaccacgcaaggtaatgtggtgacgcagctttccaatcagcagcagtcgatttccggtgtcaatctcgatgaggagtacggaaatctgcaacgttttcagcagtattacctggcgaatgcgcaggttctgcagacggcaaacgcgatttttgatgcgctgattaacattcgctaaggggagataaaatgcgtttcagtacccagatgatgtaccagcaaaacatgcgcggcattaccaattctcaggcagaatggatgaagtacggcgaacagatgtcgacgggtaagcgagtcgttaacccttcagatgatcccattgctgcatcacaagcggttgttctctcccaggcgcaggcgcaaaacagccagtacacgctggcgcgtactttcgccactcaaaaagtgtcactggaagagagtgtacttagccaggtcaccactgctatccagaatgctcaggaaaaaattgtctacgccagcaatggcaccttgagtgacgatgaccgggcctcgctggctacggatattcaggggcttcgtgaccagttgctgaatctggcgaacaccactgacggtaacgggcgctacatttttgccggttataaaacagagactgcgccgtttagcgaagagaaagggaaatacgtcggtggagcagaaagtattaaacaacaggtcgatgcttcgcgttcgatggtgatagggcacacgggtgacaaaattttcgacagtattaccagcaacgcggtagcggaaccagacggtagcgcttctgaaacaaatctttttgccatgctggatagcgccatcgcagccctgaaaacgccggtcgcggatagcgaagcggataaagaaaccgccgctgcggcgttagataaaaccaaccgcggactgaaaaactcgctgaacaatgtgctgaccgttcgcgcggaattaggcacgcagctgaacgaactggagtcgctggatttattaggtagcgatcgcgcattagggcaaacgcagcagatgagcgatctggttgatgtggactggaatgcaactatttcatcttacatcatgcagcaaacggcattgcaggcatcgtataaagcatttaccgatatgcagggattgtcgctcttccagctcaacaaataagctcgctttaaaacatatcatgaaactgggtatgttttgtctgcctgctctgggatcgccggggcgggcatttttttgcctattttgcattgttggttagcaaggatgccatttgatgaattttaatatgttgattcaaagatgaaataaaaaagccctggcagttaccagggcttgattactttgagctaattattactcaacaggttgcggacgcgcaggagcggcagaggcatgatgcgttgccgtatgaccacctgcggcacctttaccttcgaaggcaaaagtagggcgctgccagtcactgtgacgtggtgcctccggaacatattccggtgccggagcgcgtgtcattggcgcggtagcgtggttatgctcaacggtgatctcaggttcaaccgcggctaccgtttcaacttctgctgcgacttcagcgacgactggcgcggcaggttgagtaacaacttcaggttcagcaaccacaacctcagcagtttcggcaacttcttcaatatctgccgtctcttcctgcggttcaaccaccggttctgcgtgttctgcaacttcctgggctacggcaacatcagactcggtaatcacctgcggctgttcagttaccgcggcggcaattacttcaggatgcgtcgtttcaaccacttccggttgcggttcggcaacctgaacgggggcttctacgacttcagccacttcttcaataactggcgcgctaacaaccggttcgatagcggcggcgacagggacctcagtcaccatcggctgcacttgtacttcttcctgttcgcgctgctcttcaacctgtacatcttgcggacgtacaattggatagcggatccagactttgccagaggccagttccggagacgcgcacgctacggtcaacggcattggcgactgggttggataacgctcgtcacgatagcgacgacgacgctgaccactcacgcgcaggtgacgaggcgagcggcgagaacgacgcggcataccaccgttgtcacggttatcggcattgttctcttcttgctgttctggtgcagtttgcgctacgactggcagcgggactttcaccagttctgtgcgtggagctggcgcttcctgaacaattggttcggcagcgacagtttcttcaaccaccggtgcgactaccgcttcttcggctacgctttgctcgtaacgcactttctgattgagctgacgctgtttacgacgcggctgaaccggacgtacacgttcttcctgttcggtttcctgaacagattgctcttcaacattcagcgccttcgcttcttgttgcgcctgacgtttatcatcgttacggcggcggctacgttcacgacgcggcgcttgctgctcgtcggtggtacgcgctttttccgttacctcagtctgctgacggctctcacgcgtctcggcagtctgctgctgtgcctggcgacgattacgacggttttcttcgcgattatcgctgccttcagtacgttcgctacgggtgtcgcggcgctcattacggtcacggcggctgttctgacgaggcttgcgacgatcctgttgacgttccggtttcgcttctgctttcggtgctggttgctcggtcggtttggtttcttcaccaccgctgaacagcgctttcagtgcgccgaagaagcggctcaacagcccaggttgtgcaggagctgctggtgttgccggtgcagctttcggtgatggagctacgacaggcgcggcaggttcagctggcgttggcgctggcggcacatccggcatggcaaaggttgccagcgcaggttgttccggacgcttacgttcagcgaactcttcttcagacggcagcgccatcgcttcttcatgcagcttcggcagcatgtagcttaaggttggggtttcttcccctttacgcacgcgcagcacgtggtagtgcggggtttccatctgatcgtttggcacaatcacgcagcgaacaccgtcctgacgcgtttcaatggcattcaccgcagaacgtttttcattcagcaggtaagaagcgattggcacaggaacaatggcgtgaacttcctgggtgttctctttcagcgcttcttcttcgatcagacgcagaatagagagcgacagcgattcgttgtcacgcacggtgccagtaccagaacaacgcggacaaacgtgatgactggattcacccagtgatgggctcaggcgctgacgggacatttccagcaggccaaagcgagaaatatggctgatttgaatacgcgcacggtcctgacgcaccgcttcacgcagacggttttctaccgcacgctggtggcgtactggcgtcatgtcgatgaagtcgataacaatcaggccgccgaggtcacgcaggcgcagctgacgagcaatctcatcggcagcttcgaggttggtgttaaacgcggtttcttcgatatcgccgccgcgggtcgcgcgtgcggagttgatgtcgatggcagttaacgcttcggtgctgtcgataacaatggaaccaccggatggcagacggacttcacgctggaaggcggattcgatctgcgactcgatctggtagtggctgaacagcgggatctcgccggtgtacagtttgattttgctgctgaaatccgggcgacctaatgcagcgatatgctgacgtgccagttcgagcactttcgggttatcgataaggatttcgccgatgtcctgacgtaagtaatcgcggaatgcgcgaacgattacgttgctctcctgatgaatcaggaacggagccgggcggctttcagcggcttttttgatggcttcccagtgtttcagacggaagcttaaatcccattgcagcgcctcagcagatttgccgacgccagcggtgcgcacgataagccccatgccttccggcagttcaaggcttgccagtgcttcttttaattcggtacggtcgtcgccttcgatacggcgagaaatgccacccgcgcgcgggttgttcggcatcagaaccagatagctacccgccagactgataaaggtggttaatgccgcgcctttgtttccgcgctcttctttatcgatctgaacaatgacttcctgaccttcacgcaacacatctttaatgttgggacgaccatgagcactgtagttagcagggaaatattcgcgggcaatttcttttagtgggaggaaaccgtgacgttcagcgccgtaatcaacaaaagcagcttccagactcggttcaatgcgggtgattttacctttgtagatgtttgcctttttctgctcgtgccctggactttcgatatccaggtcatacagacgctgcccatctacaagggcaacgcgcaactcttcctgctgagttgcgttgattaacattcttttcatcgtaacttactcattattcttacattgacgactaagctgcgggcaaagtaacgcctttccgggtgtgaaccgatggcctcgtgtctagtcgcgtcgccaacctcacggttatcgtcagctcaaagaggcgcagagtgtcggttgcccgtttttcatgcggaaaaacagcgcaattatcaaagaaacagactgggtattactctccagaaatatttccatctaccggtaaggactgcaacccgcagcccgctaactgcctgaaagatcaatacgtcttacgccattgctgcgtggatgatcggtcgggcaaaatgggttattccgtaaaatttcttgttttaacaaggatggacacggaaacggcctcattattccactgcaagccttgttatagcaagatgacttttaccatttatcacccgcttactcacagttttttcacttcttgctggtgattggtttaataaccatcaataaagtgatcacgcagtgaagtaataaggtgcaaaagtaaatataagcatagaaaaatgagtggcgcgaatcctgttggctaattagaatcgccaaccatgaaaacagagactccatccgtaaaaattgttgctatcaccgctgacgaagcggggcaacgtatcgataactttttgcgtacccaattgaaaggcgtaccaaaaagtatgatttaccgtattttgcgtaaaggcgaagtgcgggtgaacaaaaaacgtattaagcctgaatataaactcgaagcgggtgatgaggtgcgtattccaccggttcgcgttgctgagcgggaagaagaggcggtttcgccacatctgcaaaaggtggcggcgctggcggacgtcatcttatatgaagatgatcatatcctggtgctgaataaaccttccggtacggcggtacatggcggcagtggtttaagcttcggcgttatcgaaggtttgcgggcgttgcgcccggaagcgcggttccttgaactggttcatcgtctcgaccgggacacttcaggtgtgttgctggtagcgaaaaacgctcggcgttgcgttctctgcatgagcaattacgtgaaaaaggaatgcaaaaagattacctggcgctggtgcgcggtcagtggcagtcgcatgtgaagagcgttcaagcgccgttactgaaaaatattctgcaaagcggcgaacgtatcgtgcgtgtcagtcaggaaggcaaaccgtcggaaacacgctttaaagtggaagagcgctatgcatttgccaccctggtgcgttgtagcccggtaaccggacgtactcatcagatccgtgtgcatacacagtatgcgggtcatccgattgcctttgacgatcgctacggtgaccgtgaatttgacagacagctcactgaagcaggcacgggattaaatcgtctgttcctgcacgccgcagcgttgaagtttacccatccggggaccggtgaggtgatgcgcatcgaagcgccgatggatgaaggtttgaagcgttgtttgcaaaagctgcgtaacgcgcgctaatacaagcatataagcctgataatgggcggttggcctgataaggcgtttacgccgcatcaggccgcctgcaccgattgccggatgcgacgtaaccgcatccggcgcaaacaactatcccatcagcgggtttttcccttcccgacgtaacatctgacacagcgcgattagcggtaaaccaaccagcgtgttagggtcacgtccctctaaacgctcaaacagcgtaatgccaaatccttcactcttaaagctacccgcgcagtgcaggggatgctccttacgcacgtaattatcaatctccgcctcgctcaggtgacggaaatggacgtcaaaaggctccacttctgtttgtagatgcccattcgccgaattaaacaacgccagtccagtatagaaggtgacgatattgccgctggctttgcgtaattgcagacgggcattttcttccgttaacggtttaccggtgatttcgccatcaagaacacatacctggtctgaaccaataattaaatgatccggataacgtgacgccagagattgcgctttttcttgtgccagtcgaagcaccaactgtcgcggtgattcgtcgctgcgtggggtttcgtcgacctctggtgctgcacattcaaaagagatttgcagtttttccagaagagcgcgacgccatggcgaggtggaggctaaaataagtttaggcatatttttttccatcagatatagcgtattgatgatagccattttaaactatgcgcttcgttttgcaggttgatgttcgttatcagcactgaacgaaaataaagcagtaacccgcaatgtgtgcgaattattggcaaaaggcaaccacaggctgcctttttctttgactctatgacgttacaaagttaatatgcgcgccctatgcaaaaggtaaaattacccctgactctcgatccggttcgtacggctcaaaaacgccttgattaccagggtatctatacccctgatcaggttgagcgcgtcgccgaatccgtagtcagtgtggacagtgatgtggaatgctccatgtcgttcgctatcgataaccaacgtctcgcagtgttaaacggcgatgcgaaggtgacggtaacgctcgagtgtcagcgttgcgggaagccgtttactcatcaggtctacacaacgtattgttttagtcctgtgcgttcagacgaacaggctgaagcactgccggaagcgtatgaaccgattgaggttaacgaattcggtgaaatcgatctgcttgcaatggttgaagatgaaatcatcctcgccttgccggtagttccggtgcatgattctgaacactgtgaagtgtccgaagcggacatggtctttggtgaactgcctgaagaagcgcaaaagccaaacccatttgccgtattagccagcttaaagcgtaagtaattggtgctccccgttggatcggggataaaccgtaattgaggagtaaggtccatggccgtacaacagaataaaccaacccgttccaaacgtggcatgcgtcgttcccatgacgcgctgaccgcagtcaccagcctgtctgtagacaaaacttctggtgaaaaacacctgcgtcaccacatcactgccgacggttactaccgcggccgcaaggtcatcgctaagtaatcacgcgtctgcgtgatgaagcttagtgaggattttccccaggcaactggggaaagaccaaaccgggcggcgacgataccttgacacgtctaaccctggcgttagatgtcatgggaggggattttggcccttccgtgacagtgcctgcagcattgcaggcactgaattctaattcgcaactcactcttcttttagtcggcaatcccgacgccatcacgccattacttgctaaagctgactttgaacaacgttcgcgtctgcagattattcctgcgcagtcagttatcgccagtgatgtccggccttcgcaagctatccgcgccagtcgtgggagttcaatgcgcgtggccctggagttggtgaaagaaggtcgagcgcaagcctgtgtcagtgccggtaataccggggcactgatggggctggcaaaattattactcaagcccctggaggggattgagcgtccggcgctggtgacggtattgccgcatcagcaaaagggcaaaacggtggttctcgatttaggggccaacgtcgattgtgacagcacaatgttggtgcaatttgccattatgggctcagtcctggctgaagaggtggtggaaattcccaatcctcgcgtggcgttgctcaatattggtgaagaagaagtaaagggtctcgacagtattcgggatgcctcagcggtgcttaaaacaatcccttctatcaattatatcggctatcttgaagccaatgagttgttaactggcaagacagatgtgctggtttgtgacggctttacaggaaatgtcacgttaaagacgatggaaggtgttgtcaggatgttcctttctctgctgaaatctcagggtgaagggaaaaaacggtcgtggtggctactgttattaaagcgttggctacaaaagagcctgacgaggcgattcagtcacctcaaccccgaccagtataacggcgcctgtctgttaggattgcgcggcacggtgataaaaagtcatggtgcagccaatcagcgagcttttgcggtcgcgattgaacaggcagtgcaggcggtgcagcgacaagttcctcagcgaattgccgctcgcctggaatctgtatacccagctggttttgagctgctggacggtggcaaaagcggaactctgcggtagcaggacgctgccagcgaactcgcagtttgcaagtgacggtatataaccgaaaagtgactgagcgtacatgtatacgaagattattggtactggcagctatctgcccgaacaagtgcggacaaacgccgatttggaaaaaatggtggacacctctgacgagtggattgtcactcgtaccggtatccgcgaacgccacattgccgcgccaaacgaaaccgtttcaaccatgggctttgaagcggcggcacgcgcaattgagatggcgggcattgagaaagaccagattggcctgatcgttgtggcaacgacttctgctacgcacgctttcccgagcgcagcttgtcagattcaaagcatgctgggcattaaaggttgcccggcatttgacgttgcagcagcctgcgcaggtttcacctatgcattaagcgtagccgatcaatacgtgaaatctggggcggtgaagtatgctctggtcgtcggttccgatgtactggcgcgcacctgcgatccaaccgatcgtgggactattattatttttggcgatggcgcgggcgctgcggtgctggctgcctctgaagagccgggaatcatctccacccatctgcatgccgacggtagctatggtgagttgctgacgctgcctaatgctgaccgtgtgaatccagagaattcaattcatctgacgatggcgggcaacgaagtcttcaaggttgcggtaacggaactggcgcacatcgttgatgagacgctggcggcaaataatcttgaccgttctcaactggactggctggttccgcatcaggctaacctgcgtattatcagtgcaacggcgaaaaaactcggtatgtctatggacaatgtcgtggtgacgctggatcgccacggtaatacctctgcggcctctgtcccgtgcgcgctggatgaagctgtacgcgacgggcgcattaagccggggcagttggttctgcttgaagcctttggcggtggattcacctggggctccgcgctggttcgtttctaggataaggattaaaacatgacgcaatttgcatttgtgttccctggacagggttctcaaaccgttggaatgctggctgatatggcggcgagctatccaattgtcgaagaaacgtttgctgaagcttctgcggcgctgggctacgacctgtgggcgctgacccagcaggggccagctgaagaactgaataaaacctggcaaacccagccagcgctgttgactgcatctgttgcgctgtatcgcgtatggcagcagcagggcggtaaagcaccggcaatgatggccggtcacagcctgggggaatactccgcgctggtttgcgctggcgtgattgatttcgctgatgcggtgcgtctggttgagatgcgcggcaagttcatgcaagaagccgtaccagaaggcacgggcgctatggcggcaatcatcggtctggatgatgcgtctattgcgaaagcgtgtgaagaagctgcagaaggtcaggtcgtttctccggtaaactttaactctccgggacaggtggttattgccggtcataaagaggcggttgagcgtgctggcgctgcctgtaaagctgcgggcgcaaaacgcgcgctgccgttaccagtgagcgtaccgtctcactgtgcgctgatgaaaccagcagccgacaaactggcagtagaattagcgaaaatcacctttaacgcaccaacagttcctgttgtgaataacgttgatgtgaaatgcgaaaccaatggtgatgccattcgtgacgcactggtacgtcagttgtataacccggttcagtggacgaagtctgttgagtacatggcagcgcaaggcgtagaacatctctatgaagtcggcccgggcaaagtgctaactggcctgacgaaacgcattgtcgacaccctgaccgcctcggcgctgaacgaaccttcagcgatggcagcggcgttcgagctttaaaagaggaaaatcatgaattttgaaggaaaaatcgcactggtaaccggtgcaagccgcggaattggccgcgcaattgctgaaacgctcgcagcccgtggcgcgaaagttattggcactgcgaccagtgaaaatggcgctcaggcgatcagtgattatttaggtgctaacggcaaaggtctgatgttgaatgtgaccgacccggcatctatcgaatctgttctggaaaaattcgcgcagaatttggtgaagtggatatcctggtcaataatgccggtatcactcgtgataacctgttaatgcgaatgaaagatgaagagtggaacgatattatcgaaaccaacctttcatctgttttccgtctgtcaaaagcggtaatgcgcgctatgatgaaaaagcgtcatggtcgtattatcactatcggttctgtggttggtaccatgggaaatggcggtcaggccaactacgctgcggcgaaagcgggcttgatcggcttcagtaaatcactggcgcgcgaagttgcgtcacgcggtattactgtaaacgttgttgctccgggctttattgaaacggacatgacacgtgcgctgagcgatgaccagcgtgcgggtatcctggcgcaggttcctgcgggtcgcctcggcggcgcacaggaaatcgccaacgcggttgcattcctggcatccgacgaagcagcttacatcacgggtgaaactttgcatgtgaacggcgggatgtacatggtctgaccgcgatttgcacaaaatgctcatgttgcgcgcagtctgcgtggttatgagtaataattagtgcaaaatgatttgcgttattggggggtaaggcctcaaaataacgtaaaatcgtggtaagacctgccgggatttagttgcaaatttttcaacattttatacactacgaaaaccatcgcgaaagcgagttttgataggaaatttaagagtatgagcactatcgaagaacgcgttaagaaaattatcggcgaacagctgggcgttaagcaggaagaagttaccaacaatgcttctttcgttgaagacctgggcgcggattctcttgacaccgttgagctggtaatggctctggaagaagagtttgatactgagattccggacgaagaagctgagaaaatcaccaccgttcaggctgccattgattacatcaacggccaccaggcgtaagtgaacatctccaggcggtcgttcgaccgcctgagttttatctttttgtcccactagaatcattttttccctccctggaggacaaacgtgtctaagcgtcgtgtagttgtgaccggactgggcatgttgtctcctgtcggcaataccgtagagtctacctggaaagctctgcttgccggtcagagtggcatcagcctaatcgaccatttcgatactagcgcctatgcaacgaaatttgctggcttagtaaaggattttaactgtgaggacattatctcgcgcaaagaacagcgcaagatggatgccttcattcaatatggaattgtcgctggcgttcaggccatgcaggattctggccttgaaataacggaagagaacgcaacccgcattggtgccgcaattggctccgggattggcggcctcggactgatcgaagaaaaccacacatctctgatgaacggtggtccacgtaagatcagcccattcttcgttccgtcaacgattgtgaacatggtggcaggtcatctgactatcatgtatggcctgcgtggcccaagcatctctatcgcgaccgcctgtacttccggcgtgcacaacattggtcatgctgcgcgtattatcgcgtatggcgatgctgacgtgatggttgcaggtggcgcagagaaagccagtacgccgctgggcgttggtggttttggcgcggcacgtgcattatctacccgcaatgataacccgcaagcggcgagccgcccgtgggataaagagcgtgatggcttcgtactgggcgatggtgccggtatgctggtacttgaagagtacgaacacgcgaaaaaacgcggtgcgaaaatttacgctgaactcgtcggctttggtatgagcagcgatgcttatcatatgacgtcaccgccagaaaatggcgcaggcgcagctctggcaatggcaaatgctctgcgtgatgcaggcattgaagcgagtcagattggctacgttaacgcgcacggtacttctacgccggctggcgataaagctgaagcgcaggcggtgaaaaccatcttcggtgaagctgcaagccgtgtgttggtaagctccacgaaatctatgaccggtcacctgttaggtgcggcgggtgcagtagaatctatctactccatcctggcgctgcgcgatcaggctgttccgccaaccatcaacctggataacccggatgaaggttgcgatctggatttcgtaccgcatgaagcacgtcaggtcagcggaatggaatacacgctgtgtaactccttcggcttcggtggcactaatggttctttgatctttaaaaagatctaagttgtcattttccacccatataaaaggtccgcttgcgggccttttttcttagcttttattccgacttgttccgtagtgaacatgctgccacactaacaattctctgataaggagccggtatgttcttaattaacggttataagcaggaatcgctggcagtaagcgatcgggcaacgcagtttggtgatggttgttttaccaccgccagagttatcgacggtaaagtcagtttgttatcggcgcatatccagcgactacaggatgcttgtcagcggttgatgattttctgtgacttctggcctcagcttgaacaagagatgaaaacgctggcagcagaacagcaaaatggtgtgctgaaagtcgtgatcagtcgcggtagtggcgggcgagggtacagcacattgaacagtggaccggcaacgcggattctctccgttacggtttatcctgcacattacgaccgtttgcataacgaagggatgacgttggcgctaagcccggtgcggctggggcgcaatcctcatcttgcaggtattaaacatcttaatcggcttgagcaagtattgatccgctctcatcttgagcagacaaacgctgatgaggcgctggtccttgacagcgaagggtgggttacggaatgctgtgcggctaatttgttctggcggaagggcaatgtagtttatacgccgcgactggatcaggcaggtgttaacggcattatgcgacaattctgtatccgtttgctggcacaatcctcttatcagcttgtcgaagtgcaagcctctctggaagaggcgttgcaggcagatgagatggttatttgtaatgcgttaatgccagtgatgcccgtacgtgcctgtggcgatgtctccttttcgtcagcaacgttatatgaatatttagccccactttgtgagcgcccgaattagtcatgaaaaaagtgttattgattatcttgttattgctggtggtactgggtatcgccgctggtgtgggcgtctggaaggttcgccatcttgccgacagcaaattgcttatcaaagaagagacgatatttaccctgaagccagggaccggacgtctggcgctcggtgaacagctttatgctgataagatcatcaatcgcccacgggtttttcaatggctgctgcgtatcgaaccggatctttctcactttaaagccgggacttaccgctttacaccgcagatgaccgtgcgcgagatgctgaaattgttggaaagcggtaaagaagcacagttcccgctgcgactggtagaagggatgcgtctgagcgactacctcaagcaattgcgtgaggctccgtatatcaagcacacgctgagtgacgataagtacgccaccgtagcgcaggcacttgaactggaaaacccggagtggattgaaggttggttctggccagacacctggatgtataccgccaataccaccgatgtcgcgttactcaagcgagcgcacaagaaaatggtgaaagcggtcgatagcgcctgggaagggcgtgcggacggtctgccttataaagataaaaatcagctggtgacgatggcatcaattatcgaaaaagaaaccgccgttgccagtgaacgcgatcaggttgcctcggtatttatcaaccgtttacgcattggtatgcgcctgcagaccgacccaaccgtgatttacgggatgggagagcgttataatggcaaactttctcgtgcagacctggaaacgccgacagcgtataacacctataccattaccggtttgccgccgggtgcgatagctacgccgggggcggattcgctgaaggctgctgcgcatccggcaaaaacgccgtatttctattttgtggccgatggtaaaggtggtcacacgtttaataccaatcttgccagccataacaagtctgtgcaggattatctgaaagtgcttaaggaaaaaaatgcgcagtaagtatatcgtcattgaggggctggaaggcgcaggcaaaactaccgcgcgtaatgtggtggttgagacgcttgagcaactgggtatccgcgacatggttttcactcgggaacctggcggtacgcaacttgccgaaaagttaagaagcctggtactggatatcaaatcggtaggcgatgaagtcattaccgataaagccgaagttctgatgttttatgccgcgcgcgttcaactggtagaaacggtcatcaaaccagctctggctaacggcacctgggtgattggcgatcgccacgatctctccactcaggcgtatcagggcggaggacgtggtattgaccaacatatgctggcaacactgcgtgatgctgttctcggggattttcgccccgacttaacgctctatctcgatgttaccccggaagttggcttaaaacgcgcgcgtgcgcgcggcgagctggatcgtattgagcaagagtctttcgatttctttaatcgcacccgcgcccgctatctggaactggctgcacaagataaaagtattcataccattgatgccacccagccgctggaggccgtgatggatgcaatccgcactaccgtgacccactgggttaaggagttggacgcatgagatggtatccatggttacgatctgatttcgaaaaactggtagccagctatcaggccggaagaggtcaccatgcgctactcattcaggcgttaccgggcatgggcgatgatgctttaatctacgccctgagccgttatttactctgccaacaaccgcagggccacaaaagttgcggtcactgtcgtggatgtcagttgatgcaggctggcacgcatcccgattactacaccctggctcccgaaaaagggaaaaatatgctgggcattgatgcggtacgtgaggtcaccgaaaagctgaatgagcacgcacgcctaggtggtgcgaaagttgtctgggtaaccgatgctgccttactgaccgacgccgcggctaacgcattgctgaaaacgcttgaagagccaccagcagaaacctggtttttcctggctacccgcgagcctgaacgtttactggcaacattacgtagtcgttgtcggttacattaccttgcgccgccgccggaacagtacgccgtgacctggctttcacgcgaagtgacaatgtcacaggatgcattacttgccgcattgcgcttaagcgccggttcgcctggcgcggcactggcgttgtttcagggagataactggcaggctcgtgaaacattgtgtcaggcgttggcatatagcgtgccatcgggcgactggtattcgctgctagcggcccttaatcatgaacaagctccggcgcgtttacactggctggcaacgttgctgatggatgcgctaaaacgccatcatggtgctgcgcaggtgaccaatgttgatgtgccgggcctggtcgccgaactggcaaaccatctttctccctcgcgcctgcaggctatactgggggatgtttgccacattcgtgaacagttaatgtctgttacaggcatcaaccgcgagcttctcatcaccgatcttttactgcgtattgagcattacctgcaaccgggcgttgtgctaccggttcctcatctttaagagagacatcatgtttttagtcgactcacactgccatctcgatggtctggattatgaatctttgcataaggacgtggatgacgttctggcgaaagccgccgcacgcgatgtgaaattttgtctggcagtcgccacaacattaccgggttatttacatatgcgggatctggtaggcgaacgtgacaacgtcgtattttcttgtggcgtgcatccactcaaccagaatgatccctacgatgtagaagatttacgccgtctggcggcagaagagggtgttgtagcgctgggtgaaaccgggctggattattattacacaccggaaactaaagtacgtcagcaagagtccttcatccatcatatccagattggtcgtgaactgaacaagccggttatcgtccatacccgtgacgcccgtgccgatacgctggcaattctgcgcgaagaaaaagtgacggattgcggtggcgtactacactgttttacagaggacagagaaacggcgggtaaattactggatctcggattttacatctccttttccggcattgtgaccttccgtaatgcggagcaactgcgcgatgctgcgcgttatgtcccctggatcgattactggtggaaactgactcaccttaccttgcgccggtaccgcatcgaggaaaagagaatcaacctgcgatggttcgtgacgttgcagaatacatggctgtgttgaaaggtgttgccgttgaagaactggcgcaggtaaccaccgataacttcgcccgtctgtttcacatcgacgcttcccgccttcaatccatccgttgaatgagtttttttaaagctcgtaattaatggctaaaacgagtaaagttcaccgccgaaaattgggcggtgaataaccacgtttgaaatattgtgacatatgttttgtcaaaatgtgcaacttctccaatgatctgaagttgaaacgtgatagccgtcaaacaaattggcactgaattattttactctgtgtaataaataaagggcgcttagatgccctgtacacggcgaggctctccccccttgccacgcgtgagaacgtaaaaaaagcacccatactcaggagcactctcaattatgtttaagaatgcatttgctaacctgcaaaaggtcggtaaatcgctgatgctgccggtatccgtactgcctatcgcaggtatcctgctgggcgtcggttccgcgaatttcagctggctgcccgccgttgtatcgcatgttatggcagaagcaggcggttccgtctttgcaaacatgccactgatttttgcgatcggtgtcgccctcggctttaccaataacgatggcgtatccgcgctggccgcagttgttgcctatggcatcatggttaaaaccatggccgtggttgcgccactggtactgcatttacctgctgaagaaatcgcctctaaacacctggcggatactggcgtactcggagggattatctccggtgcgatcgcagcgtacatgtttaaccgtttctaccgtattaagctgcctgagtatcttggcttctttgccggtaaacgctttgtgccgatcatttctggcctggctgccatctttactggcgttgtgctgtccttcatttggccgccgattggttctgcaatccagaccttctctcagtgggctgcttaccagaacccggtagttgcgtttggcatttacggtttcatcgaacgttgcctggtaccgtttggtctgcaccacatctggaacgtacctttccagatgcagattggtgaatacaccaacgcagcaggtcaggttttccacggcgacattccgcgttatatggcgggtgacccgactgcgggtaaactgtctggtggcttcctgttcaaaatgtacggtctgccagctgccgcaattgctatctggcactctgctaaaccagaaaaccgcgcgaaagtgggcggtattatgatctccgcggcgctgacctcgttcctgaccggtatcaccgagccgatcgagttctccttcatgttcgttgcgccgatcctgtacatcatccacgcgattctggcaggcctggcattcccaatctgtattcttctggggatgcgtgacggtacgtcgttctcgcacggtctgatcgacttcatcgttctgtctggtaacagcagcaaactgtggctgttcccgatcgtcggtatcggttatgcgattgtttactacaccatcttccgcgtgctgattaaagcactggatctgaaaacgccgggtcgtgaagacgcgactgaagatgcaaaagcgacaggtaccagcgaaatggcaccggctctggttgctgcatttggtggtaaagaaaacattactaacctcgacgcatgtattacccgtctgcgcgtcagcgttgctgatgtgtctaaagtggatcaggctggcctgaagaaactgggcgcagcgggcgtagtggttgctggttctggtgttcaggcgattttcggtactaaatccgataacctgaaaaccgagatggatgagtacatccgtaaccactaatccgtaagacgttggggagactaaggcagccagatggctgccttttttacaggtgttattcagaattgatacgtgccggtaatgctgaaattacgcggtgtgccgtagacgatagaaccttccacgttggtatcgtaggttttgtcgaacaggttattgacgttcccctgtaacgagaagtttttcgtcacctggtagcgggtgaagagatccaccagcgcgtagctaccttgctcggcgcggaaggtgccatacggtgtcacggtgtcggtatacacgcgattttgccagttaacaccaccgccgactgtcaactctggcatgacaggcaaccgatagctggtgaacattttaaccgtggtgcgtggcagattaggattaacggcgtttccttcgttatcctctgcaatatagcgcgttgcgccaaatgtcagctgccagttgtcggtaattgcgccgttgagttcaaattccacccctttactgactgtcccatccaccgctttataggcggtttcgccgttgctgccggggataggtgtaccggtggactgagcgacattatcctgctcaatacggaagatggctaacgtggtggtcagacggctattcatccagtccgatttcagacccagctcgtagttgttaccggtgattggagccagatatttgcctgaactgtcacgatcattttgcggctggaaaatagaggtatagctggcgtaggtcgaccagttgtcattgatgtcaaacaccagaccagcgtaaggcgtggtgtggtttttctccatgctgtaagtcagcgtatcaacccgccagttggtataacgtgcgccgaggatcagatgcagcggatcggcaagggtgactcgagtggcagcatataacgatttcatatgtgtggtatcgtcctgtgccaggctctgtggtgaccagtcggtttgtgggaaattgccattaaagttgtagaaactgccaatttcatccgggaagatgttggcccatgaactgaagtaacgattgttttgtttgctgtaactgccaccaaacattagattgtgctgacgaccaaacaattcataaataccgtcagcgaacaaatccagcgcatcaactttacgtttgccactgttccaaccggtgccgccgacataatcaaagccaggtccataattactgtatggcccaaccagcataccatccgctttgtttacataggcatcgacatacatcattttgctgtcaaattcgacttcagagtgggtggcattcagtgtcgcttgccaggtatcagcaaaccgctgcttcagggtcataaagaccttgttgatctctttatcgttgtacgcccagtcaggtgcggtactgcgtgcacgatcgtaactgttgctgctgccatcagtattccagcgcggtaaaccgccccaggtagggctattaacatcaatgcgctgatattcgtaaccggctgaaagcgtcgtaagatcgcctaaatcagcatcgacaatgcccgagaagaaggtcttttcactgttgtagcggtccagccatgagtcgttattctggtagccgccgacaattcgcgcgcggattttaccgtcttcggtgagtgggctttgtaaatccgccacataccgttctttgttccagctaccgtattccgccgagacatcgcctttaaattcacgactggtcgcgtgttttcgaaccatattaattgccgcagatggattacccgtcccggtcatgagtcctgtcgcgccacgcactacttctacgcgttcaaagagtgccatatcagaaagtgcgtcgcccagattccagcgcgattcaaaataggtggggataccatcaaccatatagttatcgatctggaatccgcgggaataataaagagcacgatcggaatccgcctgacttttgctgatccccagcgtgttttccatcacttcgcccagcgtttgtaactgctgatcttccatccgctgctggctaacaatagtgaccgactgaggaatatcacgttgagtcatctgcattttggtacccgcagaggtagacgttacgctgtaatcattttcgccatcatctggagctgtggctgaaccctcaacaatcaccgtttcttcagtggctggtgcagcaaaagcggcagaaggtaatagtgccagtgctatgcaaccggcaagtagtgacggtttggtgatggcttgatattgattatccctgttaaattgtgttgaaagcatttgaaatctcttggtttatgttgtcgtcaggctcatgccggaggagggtgatgagcgattatatttagtgtgcgaataactttgtttgtaaatgcaaatgagaaatatacgcattcatatttgtcgtgtaaaccaaacagagaatgtcttttcagcgcattcgcaggcagaaatgggaataatggcgatatatacggcagcaaaacgattttttgcttaagaaatcgtgagttaaggttgaaagagcaggtttaactcgaccatactctatactcgcagtgtggcgcggcgtagcatggcgcaacgcatggctatttgaaaaaggaaaatgtcgtggcagaagaaactatattcagcaaaattattcgtcgtgagatcccctccgatatcgtctaccaggatgatctggtaacggcgtttcgcgatatttcgccgcaagcgccaacgcatattctgatcattccgaatatcctcattccgactgtgaacgacgtctcagctgagcatgagcaggcgctgggacgcatgatcaccgtagcggcaaaaattgctgagcaagaaggtattgccgaagatggctatcgtctgatcatgaataccaaccgccatggcggacaagaggtttaccacatccatatgcacttgttgggtggccgtccgctgggaccaatgctggcgcataaaggtctgtaacgatgagaaaaggatgctttgggctggtgtctctggcgttgttactgctggtgggctgtcgttcacatccggaaattccggtgaatgatgagcaatcgctggtgatggagtcatctttattggctgcgggcatcagtgcagaaaagcccgtcctttcgacgtctgatattcaaccttcagcatcctcaacgctttataacgaaaggcaagaacccgttaccgttcattatcgtttttactggtatgacgccagagggctggagatgcatcctctggaaaggccacgcagcgttagcattcccgcacattcggcggtaacgctgtacggcagcgccaattttctgggggcgcacaaagtcagactttatctatatttgtaaggggtgaatcttgatgacaaaaatgagtcgctacgccttgattaccgcgctggcgatgtttctcgccgggtgtgtggggcaacgtgaacctgcaccggtagaagaagtgaaaccagcgccggaacaaccagccgagccacaacagcctgtccccacagtgccctcggtgccgacgatcccgcagcagccaggcccaattgagcacgaagatcaaacggcaccgcctgcgccgcatattcgccattatgactggaatggcgcaatgcagccgatggtcagtaagatgcttggggctgacggggtgactgcgggtagcgtcctgctggttgatagcgttaacaaccgtactaacggttcgctgaatgccgcagaagcgaccgaaacgctgcgaaatgcgctggctaataacgggaaatttaccctggtttccgcccagcagctgtcgatggctaagcaacagttaggtttgtcgccgcaggacagtttaggtacccgtagtaaagccataggcattgcccgcaatgtcggcgctcattacgtgctgtactccagcgcctctggcaacgttaacgctccgaccctacaaatgcagctgatgctggtgcagacgggcgaaattatctggtcaggtaaaggtgccgtttcgcagcaataatcccatcatgcgcgacgaattgctgtcgcgctttttcccgcagtttcatcccgtcacgacgtttaatagtgggcttagtggcgggagttttctcattgaacatcagggccagcgttttgttgtgcgtcagccgcacgatcctgatgcgccgcagtccgcgttcttgcgccagtatcgggctttatcacaactacccgcaagcattgcaccgaagccgcatttatatctccgtgactggatggtagtcgactatctgcccggcgcggtaaaaacgtatttgccggataccaacgaactggcaggcttgctgtattatctacatcaacaaccacgttttggctggcgaataacgctgttgccgttactggaactgtactggcagcaaagcgatccggcgcggcggacagtgggttggctgcgaatgttaaaacgtctgcgcaaagtgcgggaaccacggcctttacgcttaagtccattgcatatggatgtccacgccggaaatttagtgcatagcgcgtcagggttaaaactcatcgactgggagtatgccggagatggtgatatcgcgctggaactggcggcggtgtgggtggaaaatactgaacagcaccggcaattggtcaatgactatgccactcgcgcgaagatttatccggcgcaattatggcgtcaggtcaggcgatggtttccctggctgctgatgctcaaagcagggtggtttgagtaccgctggcgacaaaccggcgatcaacaatttatcaggctggccgatgacacctggcggcagctattaataaaacaataaggagagcagtgtgggtccagtaatgttggatgtcaaaggttacgaactggacgcggaagagcgtgaaatacttgcgcatccgctggtgggagggctgattctctttacgcgtaactatcatgatcctgcccagttacgtgaactggtgcgccagatccgcgcagcttcgcgcaatcatctggtggtggcggtagatcaggaaggtggacgcgtgcagcgttttcgtgaaggttttacccgcttgccagcggcgcaatcattcgctgcgctgtcaggaatggaagagggcggcaaactggcgcaagaggcgggttggctgatggccagcgaaatgatcgctatggatattgatatcagctttgcgccagtgctggatgtcgggcatatcagcgcggcgattggcgagcgttcttatcatgccgatccacaaaaagccctggcaattgccagccggtttattgatggtatgcatgaagccggaatgaaaacgaccgggaaacacttcccaggacacggtgcagtaacggcagactcacacaaagaaacaccgtgcgatccacgtccacaagcggagattcgcgctaaagatatgtcggtcttcagttccttaatccgcgaaaataaactcgacgccattatgcctgcgcatgtgatctacagtgatgttgatccgcgtccggcgagcggttctccctactggctgaaaaccgttttgcgtcaggaactgggttttgacggcgtgattttctctgacgatttatcgatggaaggtgccgcgattatgggcagttatgccgaacgcgggcaggcatcactggatgcgggttgcgatatgatcctggtctgcaataatcgtaaaggggccgtcagcgtgttagataatctgtcaccgatcaaggcagaacgtgttacacgtttgtatcataaaggttcattttcgcgacaggaactgatggactcggctcgctggaaagcgatcagcacccgtctgaatcagttacacgaacgctggcaggaagagaaagcaggtcactaaccctggcttatgtgaggaagcgatgattatctatttacacggttttgactctaacagtccgggtaaccacgagaaagtcttacaattgcagtttattgacccggatgtacgcttgataagctacagtacgcggcatccgaaacatgatatgcagcatctgcttaaagaagtggacaaaatgttgcaactgaacgttgacgagcgtccgctaatttgcggcgttggcctgggcggatactgggcggaacggattggttttctttgcgacatccgccaggtgatcttcaaccctaatttgttcccttatgagaacatggaaggcaagattgatcgcccggaagagtatgccgatattgccactaagtgtgtgaccaacttccgcgagaagaatcgcgatcgttgtctggttattttgtcgcgtaatgatgaagcacttaacagccagcggacatctgaagagttgcatcattattacgagattgtctgggacgaagagcagacgcacaaattcaagaatatctccccgcatttacagcgcattaaagcgttcaaaaccctcgggtaaatgccctcgtcgcatcaggtaaccttgccggtacctgatgcgctccgaattctgtaagtcggataaggcgtccacgccgcatccgacagtcgagcatcaatgcctgatgcgatgctgcgcatcttatcaggacgaccaaacgccctcgatatacgcttcaccctatattactcttccgaatttgctcaaataataaacaataaactctattttttgatctcacccggtaaagtcgcctatcttttcagcaacaaaacttgattaacatcaattttggtatgaccaatgcaccattcatgttattctcaatagcgaagaacattttcattgctgtaacctgttgttaattaagagctatgttaataaccattaattaacaattggttaataaatttaagggggtcacgttgactacgccattgaaaaagattgtgattgtcggcggcggtgctggtgggctggaaatggcaacacagctggggcataagctgggacgtaagaaaaaagccaaaattacgctggtcgatcgtaaccacagccacctgtggaaaccgctgctgcacgaagtggcgactggctcgcttgatgaaggcgtcgatgcgttgagctatctggcccatgcgcgcaatcatggtttccagttccagctgggttccgtcattgatattgatcgtgaagcgaaaacaatcactattgcagaactgcgcgatgagaaaggtgaactgctggttccggaacgtaaaatcgcctatgacaccctggtaatggcgctgggtagcacctctaacgatttcaatacgccaggtgtcaaagagaactgcattttcctcgataacccgcaccaggcgcgtcgctttcaccaggagatgctgaatctcttcctgaaatactccgccaacctgggcgcaaatggcaaagtgaacattgcgattgtcggcggcggcgcgacgggtgtagaactctccgctgaattgcacaacgcggtcaagcaactgcacagctacggttacaaaggcctgaccaacgaagccctgaacgtaacgctggtagaagcgggagaacgtattttgcctgcattaccgccacgtatctctgctgcggcccacaacgagctaacgaaacttggcgttcgcgtgctgacgcaaaccatggtcaccagtgctgatgaaggcggcctgcacactaaagatggcgaatatattgaggctgatctgatggtgtgggcagccgggatcaaagcgccagacttcctgaaagatatcggtggtcttgaaactaaccgtatcaaccagctggtggtggaaccgacgctgcaaaccacccgcgatccagacatttacgctattggcgactgcgcgtcatgcccgcgtccggaagggggctttgttccgccgcgtgctcaggctgcacaccagatggcgacttgcgcaatgaacaacatactggcgcagatgaacggtaagccgctgaaaaattatcagtataaagatcatggttcgctggtatcgctgtcgaacttctccaccgtcggtagcctgatgggtaacctgacgcgcggctcaatgatgattgaaggacgaattgcgcgctttgtatatatctcgctataccgaatgcatcagattgcgctgcatggttactttaaaaccggattaatgatgctggtggggagtattaaccgcgttatccgtccgcgtttgaagttgcattaatcgacgtacactggcggatgtggcataaacgccttatccgcccttgaggaacagcgcgatcggcagccgcgtcgcatcaggcattccttcagactcctccgaatccttaagtatttccagccattcccgcgcttttcatcttctgtctgatagctgcttttctccttcgcttgcatgattggcataactgcaaagaaggaggtgttcccgtgaataaatcaatgttggcgggtatcgggattggtgtcgcagctgcgctgggcgtagcggcagtggccagtctgaacgtgtttgaacggggcccgcaatacgctcaggttgtttctgcaaccccaatcaaggaaacggttaaaacaccgcgtcaggagtgtcgcaacgtcacagtgacccatcgtcgaccggtgcaggatgaaaatcgcattaccgggtcggtgctcggcgctgttgctggcggcgtgatagggcatcagtttggcggtggtcgcggtaaagatgtcgccactgttgtgggggcgctgggtggtggatatgccggtaaccagatccagggctctctccaggaaagcgatacttacacgactacgcaacagcgttgtaaaacggtgtatgacaagtcagaaaaaatgctcggttatgatgtgacctataagattggcgatcagcagggcaaaatccgcatggaccgcgatccgggtacgcagatcccgctagatagtaatgggcaactgattttgaataacaaagtataacaaggctgtactctgcaatttggcccctcattcgctcaggctgaggggctttttttgcgacttatttcaccagttcgggccataaacgcaaagtcgttccggcaatctgcattagtttttccagcgatgcaccttcgcgtgcgctgatcgacatcccctgaataatacaattaaggaattctgccagatgtgtcacgtcacagtgggtcgggatttccccgcgcgcttgtcgttgacataaaaactgctgcaaagtgcgctcttgcatcgcatggcgtgatttcaacgtattggcgatatctcctgaatctggggagagggtggtgcagttgttgatcatgaagcagcctgccggggtgtctttgctggtaaagcagttggcgatggcagcaaaatagtcagccagcgcagactccacgcttttctcttcacaaaacagctgtgcttcatgcttagcggcaaaacgatcgatatagcggtcgagaacggcacgaaataacccctctttgttggtaaattccgcgtatagcgtgggcgctttggctccggtcgcttcgacgaggtccgcaagagaagtcgcttcataaccgtgttgccagaacaatttcatggccttatcaagcgcggcatccctgtcgaacacttttgggcggccacggcttttttttacacattgtgttgagtcagttgccatgatgccgttgtacctggtgactgtgaatgaaaggttattataaaaataatcacctccgttcaccagtccagatcccataaaaataattgctttctatttaactgaaatttaaagatttttaaattaattaatgattgttataaaaaaatatcttgtatgtgatccagatcacatctatcatttagttatcgatcgttaagtaattgcttgcgacgtcattcatctgcataaggccactattatgaaaaacgtaaaaaccctcatcgctgcggcgattttaagctccatgtcatttgccagctttgcggctgtcgaagttcagtcaacgccagaaggccaacaaaaagtcggtacaatcagtgctaacgcggggacaaatctgggatcgctggaagagcagctggcgcaaaaagcggatgagatgggcgcaaaatctttccgtattacttctgtaaccggtccgaataccctccatggaacagcagtaatttataaataagcattaaccctcattaatgcctgctactgctgatttttccccgcgacatgccgtgtcgcggggattttttttatccaggatttacagagtttgtgggctcacttgatgacggcggacatccaccggcatcccggaacggacatccatcacatgttgcatcacttcagcgtcagtttgtgctgcatctttaaatgattgcattgcgctattcagcgtaattggcagcagctgcggatcgtcatcaatcttctctgacagcggctgatgtacttcaaccagacgcgcaccgtttggttcggcagagacttttatcggagtgttgatgatattcactttggtgcctggggtgacctggctaaagagtgttttgatatcgtcatcccgcagacgaatacagccagaacttacccgcatgccaatgccgaaatcggcgttcgtaccgtgaagcaaataaacgccgccataggccgccagacgaatcgcatgatggcccattgggttatccggtccagccggcactaccgcaggcaactcaattccctgtgctttataacgggcgcggatgtttgccgttggcgtccaggttgggtttgcacgtttgtctgaaacggtggtcaccattgtcggtgtcagcgtgtcaccacctaactgacaatacctattggatacacggttaccgaatttttacccggcgggtagtaatagagacgcagctccgcaatgttgatcacaatgccttcgcgcggcgcgtctggaagtagggtttgcaacgggatcgttaacacgctgcccgcgcgcggtacgtaaggatcaacgccggggttagcctgtaacagagcgagaaagccgacgttatattttttggcgatggcttccagagaaccaccgtcattttccaccacatgaaatttgttttcgccaaccagacgactgcccgctggcggcagcggccaggtgttggcttttgccggtagcgccagcgccacggcagcggcgaacgtaaaaaacgttagccagcgagaaaaacgcgttttgatcatcaccaaaaatccataataaatataaggttattgtaataaacagataagcctgaattatggatggtgacagtgtcggatagtgcagggaagtgcaaagaatttgtaaatgttgcagatgggggcgcagaaacgcccccgatttaccattaagcgatcgcgttctcttccagttcacgcataaactggcgtacccattcgatacgcgttttccgctcactcaaatcctgaataaatttcaggcgcgtcggaccatcaaggcggtaatgctgcggctgtttttgcagcaaaccaatcaaccaggccggattaacgtgattcttctcggcaaattcgatcaccccgcctttctcattaccttccagcttcctgatccccagtttctgcgcttgctggcgcagacgggcaacatccagcagggtacgcgccggatccggcagcaggccgaagcgatcgataagctcgactttgatctcttccagttcgttttccgttttggcgctggcaatacgtttatagaacgacaaacgcgtattcacgtcaggaatgaaatcatctggcaatagcgacggcatccgcagctcgacttctgtttgctggctggtgagatcttccagcgacggctcgcgtccggctttcagtgcatcgacggcgttttccagcaactccatatacagcgagaaaccgatggtttccattgagccgctttgttcttcgccaagcagttcacccgcgccgcgaatctccagatcgtgcgttgccagcgcaaaacctgccccgagatcttccagcgaggcaatcgcttcaagacgtttttgtgcatcggtagtcatcgcttttggatgcggcgtcagcaaccatgcatatgcctgatgatgcgaacgtccgacgcgaccgcgtaactggtgcagctgcgccagaccgaagtgatccgcacgttcaatgataatggtgttggctgtcgggatgtcgatcccggtttcgataatggtggtacaaaccagcacgttgaaacgttgatgatggaaatcattcatcacccgttccagttcgcgctcgcgcatctgcccgtgaccgatggcgatccgcgcttctggcaccagttctgccagccgttcggcggctttctgaatgttttccacatcattgtagagataataaacctgtcctccgcgcaaaatttcacgcaggatcgcctcccggaccaccaggctgtcatactcacggacaaaggttttaactgccagacgacgggcgggcggcgtggcgataatcgacaggtcacgcattccgctcattgccatattcagcgtacgtgggatcggcgttgcagtaagcgtcagaatatccacgttcgcgcgcatcgctttaatacgctctttatgacgcaccccgaagcggtgttcttcatcgacaatcagcaggcctaaatctttaaacttgacgtcactttgcagcagtttgtgcgtaccgatcagaatatcgattttcccttccgccacttccgcaaggatttgcgtctgctctttggcgctgcggaaacgggagatcatttcgatacgtaccggccagttggcgaaacggtcgcggaagttgtcgtaatgctgctgcgcgagaagggtggtaggcaccaacaccgccacctgcttgtggttatctactgccaggaaagcggcgcgcatcgccacttctgttttaccaaagccaacatcgccgcacaccagacgatccattgccagcggctgacacatgtcgctaagtaccgcattaatggcctgcgcctgatccggcgtggtttcaaacgggaagctgtcgcagaacaactgatactgctcacgatcgtgtttaaacgcgaagccctctttggcggcgcgttgcgcgtagatatccagcaattccgccgccacatcacgcactttttccgccgctttctgccgcgcgcgtgaccacgcatcgccgccaagtttatgcagcggggcgttttcttccgcgccacctgcgtaacggctaatcagatgcagtgacgacaccggaacatacagtttggcgtcgttggcataggtgagcatcaaatactcgccagtaatgccgcccgcttcgagcgtggtcattccggcatagcgcccgacaccgtgctccagatggaccaccggctgaccaatatgcagctccgcaaggttacggatcagtgtatcggggttgatggtgcggcgagaatcctgacgacggcgggcaacacgttcaccgagcagatcgctttcgcagatcagcgccagattacgcaccttatcgacaaaaccatgttcggcagcgccaatcatcagataacgcccacggtcgctggcttcatcaagacgcataatgcgttgcggagcaattttaattcgtgcgagcagttcacccagcgcttcacggcgaccttcactttctaccgagaacaccaccggaccgtcgaaagtctcgaggaacttacgcagcgcatccagcggcgctttttgttgtgcctgaacggccaggtctggcagtttctggaaacctaaattggcattcgcggcttttgtcggtaaatgttcagtttttagctgcacccggggccagtttttcagctctgagaagagctcgtccacccgcagccagagcgattgtggtggcaacagcgggcgcatcggatcgacgccgcgattctcaaaacgcgccagcgtgtcagcctggaaacgttcggcactggtttccagatcgccagtattcaccagcaaggtattggcagggaaataactgaacagcggcggcagtggttcgctgaagaacaatggctgccagtactcgatcccggcaggtaatgtgcctttactcacttgctggtaaatatgttccggatcgcgcttcacttcgaaggtatcgcgccactggctgcggaacagttcaattgccgctttatcggtcggaaattcgtgcgcgggcagcagattgatcgcttctacttcctccagcgtgcgctggctgtcgacgtcaaacacccgcaggctgtcgatttcatcatcaaagaaatcaagacgataaggcagctcactccccatcgggaagagatccagcaacgcgccgcgcgtggcgtattcgccgtgctccatcacctggtcaacatggcgataaccggcgctgtccagttgggttcgtaatgcatctcgtgacaggcgctgaccttttttcatcaccagcgcatgaccgtggagaaaactgtgtgggcaaacgcgctgcataagcgtattcaccggaacaatcagtacgccacgctgcatcgtcggtagctggtaaagggtggaaaggcgcgaggagataatgtcctgatgaggcgaaaaactgtcgtagggaagagtttcccagtccgccagattcatcaccatctgatcggtgaactggctgatttcatcatgcaaacgcagagcattttgcatatctggtgcaatgagtaccaccggaccggcgtgacgttcggcaatttccgctaccagcgttgcacaggctgcgccggttaactcgcccagcagacgctgctcacccgctttgacgggcagcgtataacgatattgttcaggcataacggttgtcagattctcgttaggatatgcctcaacatatgggggcatatctctgataagcaatgctgttcattatccgtaatcgacatggtttagcaaattgaatcgccccggctggggcgatggcttagcgggagtaactgacggcagcgggcagtgaaggcggggagaacaacagatcgctgaatgcacgctgtgaaagttttcttaccagcaagcccgcaacagtacagatgaacaaactgacaaagggataaaccagcaggagtgtcagttcgacttgcggcgaccagcgtgctgcgttcatttgcgcaagcagagttaagctgaatatttcaaccagaatgcgatgggtggtgtagatagcaatggtgttggagccaatcacattcagcaggctggtggagcgcataccgaatcgttgctcgtattgataaaacagcttcatgatcaccacaatcgataccagcgacaacagcagcgagatagtaaacaaccaggcaccgaccgccagaacggtaagcaaagaagccatcagcagatggcggcgcaacggcacctctttaacacaggtcattattgttgcgccaaaccatgcgccaaggctgtaataaggcaaattgcggatcacactgttcattccccaccacggcgtgggaacgaaattaaccgccacactcaacagtacaaacaaggcgaatagtggcagcgccagacggctaaaaattttacataccacgaaatagacaattaacgcatacagataccacaagctggtgctggcggtgatcatcccgtgcaggaactcaccggtggaatcggcataagcggcattggaggcattgcttaaatcgcgctcaggtgccagccattggttcagcgcacttaacgccagccactgcaccacgccccaaagcgccagcacccagaagatgttccagatccgtttatcgagacaatttccccacggtacgctgtcgatatagcggcgaatcaaatagccggaaataaagaaaaaaaccggcatacgaaagggggcaaggtaaagattgaaatagatccagcatttgctcaggacttccgataacggatgctgaaaagtggtcagatgcggataaaaggtaatgaccgagtgataaatcaccaccagacaaatacataaccctttgatctggttaatccatagctctttttgtttcatcaggacaacacgctcttttttaatttacatgcggttgatcctgcgggttatgacccgaggtgtaatgggtatctgtctgtattggatgatttttcagattaagatcaggcggcaagattgatgataaaacatggcaatttagccgattgatttacggggcttttcagattagccctgacgatcacttacagttcagacgtttacccatcttgctttcgcttatatactcgtgtctttgctacagcaaccagacggatttcatgtaccaacctgtcgctctatttattggcctgcgttacatgcgtgggcgtgcagcggatcgcttcggtcgtttcgtctcctggctttctaccatcggcattaccctcggggtgatggcgctggtcacagtattgtcagtgatgaacggctttgagcgcgagctgcaaaacaacatccttggcctgatgccacaggcaattctctcttctgagcatggctctcttaacccgcagcaactcccggaaacggcagtcaaactggacggcgttaatcgcgtcgcacctattactaccggtgatgtggtgctgcaaagcgcgcgcagcgtggcggtcggggtgatgctcggtatcgacccggcgcaaaaagatccacttacaccgtatctggtcaatgtgaaacaaactgacctcgagccggggaaatataatgtcatcctcggcgaacaacttgcctcacagctaggcgttaatcgcggtgatcaaatccgcgtgatggtaccatctgccagccagttcacgccgatggggcgtattccaagccagcgcctgttcaatgtgattggcactttcgccgccaacagtgaagtcgatggctatgaaatgctggtgaatattgaggatgcctcgcgtctgatgcgttatccggcaggcaatattaccggctggcgtttgtggctggatgagccgctgaaagttgactctttaagtcagcaaaaactgcctgaaggcagcaaatggcaggactggcgtgaccgtaaaggcgagctgttccaggccgtacgcatggaaaaaaatatgatgggcttgctgctgagcctgattgtcgccgttgcggcgtttaacattattacctcactagggctgatggtaatggagaagcagggcgaagtcgcgatcctgcaaacgcaaggcttaactccgcgacaaatcatgatggtctttatggtgcaaggggccagcgccgggattatcggtgcgatcctcggtgcggcgcttggcgcactgcttgccagccagttaaataatctgatgccgataatcggcgtcctgcttgatggcgcggcgctgccggtggctatcgaacctttacaggtcattgttattgcgctggtggcgatggctatcgcgctgctgtctacgctttacccttcatggcgcgctgccgccacacaacccgctgaggctttacgttatgaataagatcctgttgcaatgcgacaacctgtgcaaacgctatcaggaaggcagtgtgcaaaccgatgtactgcacaatgtcagtttcagcgtgggcgaaggtgaaatgatggcgatcgtcggtagctctggttccggtaaaagtaccttgctgcacctgctgggcgggctggatacaccaacctccggcgatgtgatctttaacggtcaaccgatgagcaaactgtcttcggcggcgaaagcagaactgcgcaaccagaagctgggctttatttatcagtttcaccacctgctgccggattttactgccctggaaaacgtggctatgccactgctgattggcaagaaaaagcccgctgaaatcaacagccgtgcgctggagatgttaaaagcggtggggctggagcatcgtgcgaatcaccgcccatctgaactttctggcggcgaacgccagcgtgtggcgattgcccgtgcgctggtcaataatccgcgtctggtacttgcggatgagcctaccggtaacctcgatgcgcgtaacgccgacagcatcttccagttgcttggggaattgaatcgcttgcagggcaccgccttcctggtggttactcacgacctgcaactggcgaaacgtatgagccgccaattggaaatgcgtgatggacgtctgacggcggaactgagcctgatgggggcggagtaatggcgatgcctttatcgttattgattggcctgcgttttagtcgcggacggcggcgcggcggcatggtgtcgctgatctccgttatttctaccattggcattgccctcggcgtggcggtattgatcgtcggcttaagcgcgatgaacggctttgaacgcgaactgaataaccgtattctggcggtggtgccgcatggtgaaattgaggcggtaaatcagccatggactaactggcaggaagcactggataacgtgcaaaaagtgccgggtattgccgctgctgcgccgtatatcaatttcaccggactggtagaaagtggtgccaatctgcgcgcaattcaggtgaagggcgttaacccgcaacaggaacagcgtctgagcgcattaccctcgtttgttcagggggatgcctggcgcaattttaaagcgggcgaacagcaaattatcatcggcaaaggcgtggcggatgcgctgaaagtgaagcagggcgattgggtgtcgatcatgatccccaactcgaatcccgagcataaactgatgcagccaaaacgtgtgcgtttgcacattgccggtattttgcagttgagtggtcaactcgatcacagttttgccatgatcccgctggcggatgcccaacaatatcttgatatgggttccagcgtgtcaggtattgcccttaaaatgacggatgttttcaacgccaataagctggtacgcgatgcgggtgaagtgaccaacagctatgtttatattaaaagttggattggtacttacggctatatgtatcgcgatatccagatgatccgcgccattatgtatctggcgatggtactggtgattggcgtggcctgtttcaacatcgtctccaccttagtgatggcggtgaaagacaagagtggcgatatcgcagtattaagaacgctgggggcgaaagatggtttaattcgcgccatctttgtctggtatggattgctggcagggctgttcggcagcctgtgtggggtgattatcggtgtggtggtttcactgcaacttaccccgattattgagtggattgaaaagttgatcggtcatcagttcctctccagcgatatctattttattgatttcctgccatcggaattgcactggctggacgtcttctacgtactggtcacagcattgttgctgagtcttttggcaagttggtatccggcgcggcgcgccagtaatattgaccctgcgcgagtccttagcggccagtaaaggcagtacattaaaacaaggagcggcaatgtattacgggtttgatattggtggaacaaaaattgcgcttggcgtgtttgatagcggtcggcagttgcagtgggaaaagcgggtgccgacaccgcgtgacagctatgacgcatttttagatgcagtgtgtgagctggtagctgaagctgaccaacgttttggctgtaaaggttctgtcggcatcggtattccgggaatgccggaaacagaagatggtacgctgtatgccgccaatgtccccgctgccagcggtaaaccgctgcgtgccgacctgagcgcacgtcttgatcgcgatgtacgccttgataacgatgccaactgttttgccctttcagaagcctgggatgatgaatttactcaatatccactggtgatggggttgattctcggcaccggcgttggcggcgggctgattttcaacggcaaaccgattaccggtaaaagctacattaccggcgagtttggccatatgcgtctgccggttgatgcgttaaccatgatggggttggatttcccgttacgccgctgcggctgtggtcagcatggctgcattgaaaattatctgtctggtcgcggttttgcgtggctgtatcaacactattatcatcaaccgttgcaggctcccgaaattattgcgctttatgatcaaggcgatgagcaggcaagggcgcacgttgagcgttatctggatttattagcggtttgtctgggaaatatcctgaccattgttgaccctgacctggtcgtcattggtggtggcttatcgaatttcccggcaatcacaacgcaactggcggacaggctgcctcgtcatctcttacctgtagctcgtgttccgcgcattgaacgcgcgcgccacggtgatgcgggaggaatgcgtggtgcggccttcctacatctaaccgattaaacaacagaggttgctatgctgtcgcgtcggggtcatcggttaagtcgttttcgtaaaaataaacgccgcctgcgcgagcgtttgcgtcagcgtatttttttcagagataaagtggtgccggaagcaatggaaaaaccaagagtactcgtactgacaggggcagggatttctgcggaatcaggtattcgtacctttcgcgccgcagatggcctgtgggaagaacatcgggttgaagatgtggcaacgccggaaggtttcgatcgcgatcctgaactggtgcaagcgttttataacgcccgtcgtcgacagctgcagcagccagaaattcagcctaacgccgcgcatcttgcgctggctaaactgcaagacgccctcggcgatcgctttttgctggtaacgcagaatatagacaacctgcatgaacgcgcaggtaataccaatgtcattcatatgcatggggaattgctgaaagttcgttgttcgcaaagtggtcaggttctcgactggaccggagacgttacgccagaagataaatgccattgttgccagttcccggcacccttgcgcccgcacgtcgtttggtttggcgaaatgccactcggcatggatgaaatttatatggcgttgtcgatggctgatattttcattgccattggtacttccgggcatgtttatccggcggctgggtttgttcacgaagcgaaactgcatggcgcgcacaccgtggaactgaatctcgaaccaagtcaggtcggtaatgaatttgccgagaaatattacggcccggcaagccaggtggtgcctgagtttgttgaaaagttgctgaagggattataaagcaggaagcattgcctgatgcgctacgcttatcaggcctacaaggggacgcaattaattgaatttgcgggttttgtgggccggataaggcgttcgcgccccatccggcataatacacgcgcacttttccggcctcttttatcgtttactcgtcaataacaatgcggcaataaacgtacagacaccaattagccctgcccagagtggcgatattctggtaatcgcaaagctattatcgatatacaaacataaagcctgataacccatattggcaatagtcatcgccactgcaaattttaacgcataaataaaacgagtcgtgtagcaaaagatccaggaaaataagataaacgtcgcagcccaggcgataaaacctaatgtgttggtgctgccggggggagcattttcatgctgttgtcctggatgcggataatacgtcagtggcggcgtcggttgttttaatatctgtgcttgtagaacagccaatgcattattgattccctgataccagagatctgcatttaaataagccagcgtgtgattttctatcagaaggccgagatgtttatcgtccagaccactttcaacctggccgttggtgatcataattaaccgtggttcgcgggtagtaaatagtaacagaacacttccttttacattactcaatgaagatgacgcatgcgccagcatcgctttaccattttgtctgagactggcttcattattaatgtcgggtaaaatcacaataaacggtgcaattcccgtttgttggcgaaaaagctcggctttacgtgcgatctcttcagcatccggtacagtaccggtaacatccgtaaaaagtgtcttcattattggaatcaatggtttactggttgctaccagaggcaggagtatcagtaaactgagcagtataatgaatttttttatgggcgggacttccgtttcctgcgagattttttggtggaggggagcgtgattatcagaccgacactaccgaaaataatgcctgctatgccaacaaagccccatttaaaaaaattaacccagggattgtttatttcggcttgttctggatgccctggcggataatagacattgactctgtcaccttcgctatcttcataaaaatcactaccgatattcgaattgaaaattagcgtgtaatctggcgtagggcgaaaggcaaccactggataccaggaaccattatcatcgacgtcgtttgagtgattgttgtaccaaacggcatcaacaatgattccttctgtatgaaccgcgcttttggtaaaagtaaaatggtaataaaagatgattgcagaaataacgagcaatatcagaccgataccgagaaaagcgcgggataaaactttactgtcctgactcattagccacatccttgctaactaaaaaacgggcggtaataccaccgcccgtttgctgaattaacgtcctgctttcagcttctgataatactcttcataaatgctgctggctgcgccaacgtcattctgccattcaccatttttaatggtttcagcatccgggtagagcgttttatcgttcgccacttccgggcttaacagcttacgcgccgcaaggtttggcgttggataaccgatagtttcggcaacctgttttgccacatccgggcgcagcaggaagttgatcaatttcagcgcgccttctttgtttttggcatttgccgggatcgccaggctgtccatccagaaaatgccgccttctttcggccacaccacgtcaattggcgtacccgcctggcgtgcaacgaaagcagagccgttccagatcatgccgaggttaacttcgccttccatgtacgggttagccgggttatcggagttaaacgctgcgacgtttggcatcagttttttcagctcgttatatgcagcttcaatctctttcggatcggtagtgttaccggagtagcccagtttgcgcagcgccatctggaacacttcacgggcatcgtcggtcagcagcaggctacctttgtactcaggcttccacagatcggcccagctggtaacggatttcggatctaccgcatcaccgttaacgccaatcgccgtcgccccccagatatacggaatggagtagtcgttattcgggtcaaacggcttgttgagcatgtctggatcgaggttgctgaaattgcttaacttcgacttgtcgatcttctggatcatcccttctttacgcattttatcgacgtaataggttgaaggaaccaccaggtcgtaggcaccgtctttgtacgttttcaacttggcgtacatggtttcgttcgactcgtaagtcgaatagataaccttaataccggtttctttggtgaactgttcaagcagtcctggcggcacgtactcggtccagttgtagaaatacagcgtattgttgtcatcggcgtgagcggcgctcatgcccagtgccagagcacccgccgcgagcaggtggcgtgaccattttttcatttaacgtcccctgtgttacctttcgttttatcacgagcaataagctggctggcaattaccatcaccagcgacagcaccagtaatatggttgccagcgcgttaacttccggcgatacgccgactttgaccatcgaataaatttttaacggcagaatttcatagcttggtccggtgacgaacgaagaaactactacatcgtccatcgacagggtaaagcttaacacccagcccgccgccaccgcaggcattgccagtggcagaatgatttttcgcagaatggtaaattcactggcaccgagatctttcgccgcttccagcatccgcacgtcaaaacctttcaggcgcgaatacaccgtcaccaccacaaacggcaggcagaaggtgatatgcgagaacagcagcgaccagaagccaagctgaatacccagcagcataaacagcaccagcagagaaatcgccatcacgatatctggtgacatcatcaccacaaacagcattccgctaacgaacggcttaccacgaaagcgataacggtacagcgcaactgccgtcagtgaaccgataagcgtagcaaatgtcgccgaaaacaccgccattgttagtgaatgctgcgctgcctgtaacaggctgtcgttgttcatcagcaggctataccatttggtggtaaaaccctgccagttgatgccaaagcgcgagctgttaaaggagttcacaatcaaaataatgattgggatatacaggtacgcgtagatagcggtcataaaaccgccgcgaagcagtcgaccgatcattcgagttccacctttttattcagcagacgagaagcgcgccagtaaaccagcaacatcaggcccattacgatagtcagcgtaatgctggtggctgcaccaaacggccagtcacgaatattgaggaactggaccttgatgacgttaccgatcagcaggtttttcgcaccgcccatcaggtcggatacatagaacaggcccatcgctggcagcatcaccagcagacatccggcaataattcccggcatcgtcagtggaataatgatacggataaaagtctgtaacttgctggcaccgagatcgcgcgccgcctcaagcaacggcttatccagtttttcgatactggagtacagcggcatcaccataaacggtagcagaatgtaaaccagaccgataatcaccgcactgggcgtgaacatgatacgaattggtgtgtcgataacgcccagccagagcaaaaactcgttgagatagcctttggtgctgaggaaaattttcagcccgtagatgcgaatcagtgagttggtccagaagggaacaatcagcagaaacagcagcagcggacgcaccttgtgtggtagcttcgccagaaaccaggcaaacgggtagcccagcaccaggcaggcgagggtggcgatcagcgccatattcagcgagtgcaatagcacttcaaaatagagcggatcgagcagacgcgtgtagttatccagcgtaaagaccattttgacgaaactggcgtcgtcgcgggtcaaaaagctggtgccaatgatcatcaggttgggcagaaagacaaacaacacaagccaaccgacaatagtgacaatcactacattctggaacttacttgtgttcttcatcagccagtacgacctcccagctttctacccaattaatggccattttttggtcgagagagtggtcaaagtcagggtcgtcttcattgaagaattcgctgaccatcaccatcttgccattttccagttcaacaaccgactccagcgtcatgcctttgtagttacgctcacgaacgtaaccaatcagcccttcagcgtggttgtcgtcgttaatctcttcaacacgtaagtcttccgggcgcagcagaacatgcagtttttgccccggttcaacggcgaagttaacgtagatattacattcgcggccttcaacgttggcgcgtacgcgctgctcgtcgagtcgctcgatcaccgtggcgttaaacatattaatttcgccaatgaacccggcaacaaacaggtttttcggctcttcgtagatttcacgcggcgtgccgtcttgctcaatgcgaccatcgcgcatcaccacaatcctgtctgacatggtgagtgcttcttcctggtcgtgagtcacgaagacgaatgtaatgccaagcttacgctgtaacgctttcagctcattctgcatttgcttgcgcagtttgtaatccagcgctgagagcgactcatccagcaacaacagacgaggcttgttaaccaccgcgcgggcaatggcgacgcgttgctgttgaccaccagagagctgatgcggtttacgttgagcgaaggtttccagttgcaccatccgcagggcttccatcacgcggggcgtaatttcagcagcgggggttttttgcatgcgcaacccaaaggccacattttcgaacacggtcatgtgggggaaaagtgcgtagctttggaaaacagtgttcacatagcggttttccgccggaacgtgggtgatgtcctcgttatccagcatgatgcgtccggaatcaacagtttccagacctgcaatcaggcgaagaacggttgttttaccgcagccagaagggccaagcagcgtgaggaactcgccattgttgatagtcagatccagctggggaatgacctctttaccatcaaagcatttgcgaattcccgccaattgcaccagcggtgaaagcgaactcggttgtttattcaattttttactctgtcccatgtaaacgcaacggatggcttaccgatgcggggtttgtggttaaccaccttggtgactcttaatgagggcggtaattctacggcaaaccgcttgaatcgccaatctttgttgtgaattactggcttagctttatattcattaaggtaatgctgataaatattcccgcttgcaggggtaaaagtgacctgacgcaatatttgtcttttcttgcttcttaataatgttgtcacaaaaagtgagggtgactacatggataaactacttgagcgatttttgaactacgtgtctctggatacccaatcaaaagcaggggtgagacaggttcccagcacggaaggccaatggaagttattgcatctactgaaagagcagctcgaagagatggggcttatcaatgtgaccttaagtgagaagggcactttgatggcgacgttaccggctaacgtccctggcaatatcccggcgattggctttatttctcatgtggatacctcaccggattgcagcggcaaaaatgtgaatccgcaaattgttgaaaactatcgcggtggcgatattgcgctgggtatcggcgatgaagttttatcaccggttatgttcccggtgctgcatcagctactgggtcagacgctgattactaccgatggtaaaaccttgttaggtgccgatgacaaagcaggtattgcagaaatcatgaccgcgctggcggtattgcaacagaaaaacattccgcatggtgatattcgcgtcgcctttaccccggatgaagaagtgggcaaaggggcgaaacattttgatgttgacgccttcgatgcccgctgggcttacactgttgatggtggtggcgtaggcgaactggagtttgaaaacttcaacgccgcgtcggtcaatatcaaaattgtcggtaacaatgttcacccgggcacggcgaaaggagtgatggtaaatgcgctgtcgctggcggcacgtattcatgcggaagttccggcggatgaaagcccggaaatgacagaaggctatgaaggtttctatcacctggcgagcatgaaaggcaccgttgaacgggccgatatgcattacatcatccgtgatttcgaccgtaaacagtttgaagcgcgtaaacgtaaaatgatggagatcgccaaaaaagtgggcaaagggttacatcctgattgctacattgaattggtgattgaagacagttactacaatatgcgcgagaaagtggttgagcatccgcatattctcgatatcgcccagcaggcgatgcgtgactgcgatattgaaccggaactgaaaccgatccgcggcggtaccgacggcgcgcagttgtcgtttatgggattaccttgcccgaacctgttcactggcggttacaactatcatggtaagcatgagtttgtgactctggaaggtatggaaaagcggtgcaggtgatcgtccgtattgccgagttaacggcgcaacggaagtcgtgattgcccgatgcgtatgtggactgccaattaccgggatgaaaccgttatattgacactggtccacatacttatcgtgcctacaggcgttcagtgcatgtaggcactataaggcgcaatcagcaccacatccggcttaaatccaaacttacccttcgaagaaccaatacccgctatttaccagcgccgcgagcattgcgaggaatgacggatcttccagcgcatcgccaaaattctccgcagtcagcgcaatgttgctggcgagtgcatccagtgccggacggtgcggggaatcgatcttctcaccattggcatacacgtcgtcgccaatgcgcaatacgcgcagaccacccaggcgcaccagcacatcaccttgtttcagcgcatcgtagatttcatctggctgataaggcggttccggcggcgcgatatccagttcatgacgtgactgggatataaactcgccaaaccattgcttaaagtgttccggctggttgatcaattcgagcatcatctcacgcagtttatccatctcttgcggcagaacatccgcaggatgagcgcgaggtggaacatccggatcgctgtagtagttgccgcccagttcacgttgcagcacataatcggcaaatccgctaatcagttcccgcgtattcggcgcgcgaaaacccacggaatagttcatcgcattttccagcgcgtagccttcatgcgggaatcctggcggaatataaagaatatcaccaggctccagctcttcatcgatgatggcttcgaacggatcgacctgtaacagatccggatgtgggcagtgctgtttcatttgcagcttttcgcccactcgccagcgacgacgtccggtaccctgaatgataaacacgtcgtactgatcgagatgcgggccgacgccgccgccaggtacagaaaaagagatcatcagatcatcaatacgccagtccggtagttcacggaacggtcgcatcagcgcggcggtcggctcatgccagtggtttactgcctgtaccagtaatgaccagttggtttcaccgagatgatcgtagctttcgaacgggccgtggctgacctgccatttgccatcctggtgactgaccagtcgactgtcaacttcgctttccatcgccagacccgccaactcgtctggagagatcgggtcaataaaattattaaagccgcgttttaacaccaccgggcgtttctgccagtgacgttcaagaaaatcgggccagttaagagtgagttggtattccatgttaagcatccacaggctggtatctgcaaccgattataacggatgcttaacgtaatgcgtgaagtatggacatatttattcatctttcggcgcagaatgctggcgaccaaaaatcacctccatccgcgcaccgcccagcatgctctctccggcgacgattttaccctcatattgctcggtgatttcgcgggctaccgccagccctacaccttgcccagggcgtaaagtatcaacccgttgaccacggtcgaaaatgacctctcgcttgcttaatggaataccggggccatcatcctcgaccacaatatagagatgctcgtcggtttgccttgcagaaatttcgacaaactcgaggcaatatttacaggcattatccagcacgttgcccatcacctcgacaaaatcgttctgctcaccgacaaagctgatctctggcgaaatatcgagagagatattgacccctttgcgttgatacactttgttcagcgctgaggtgagattgtccagcagtggggcgaccggatgcagctcgcggctgagcaatgtcccgccgcgcatactggcacgatgcaggtagtagccaatttgctgtgaaatgcggctgatttgctccagcattaccggctcagcatcactgacgctcatcttttcactacgcagagaacgcagcgtactttgcagcaccgccagtggcgttttcagactatgggtcaggtcggtgagcgtcgtacggtatttgtcgtaacgttcgcgttcactttttaacaatcggttcaggtttcgtaccagactggtcagttctcgcgttgtggctggattgagcaattcgcggttatgttcttccagttcgcggacttcttttgccagggcttcgatggggcgtaaactccaccaggcggcgacccacagcagcgggatcactaacagcagattggctgagagcacatagataaaccagctccagaccatataggaactttttagctccaccggaatggtatccaccaccacaatggttaattttggcatccgcgatgttgccgggtagacgtttactgccaccgagtgggtcatctccgcgtcgtcatcatcttcccgcacttcctgcaactgttgctgtatcgaatgatctccactcagcaagaggctggtatcgttaacatccgcttcaatttcatgaaaaccattcgatttcagccagtcaggctggatcatcttcatcagccagggcacgtcacgttgcgcccataaaagctgcccgttctcatcataaattagcgtcatggtggggctttgcttgtcgatattttcgggtaactcgacatgcaacttattgttttcccacttcgcaagggtatagaacagattgctctcgccacgtaacagccgaaacgtagttttatcgaaactgacgctataaccgatcagcgcgaccattccgtaggcaagcgaaagcaccagtactaccgcagccgttgccaacagaaaacgtacccgcagtgagagcgggaaaaaaagacgcagtaattttttcatcagcgcaattcgaacaaatagccctggccgcgaacggtagtaatcacttcttgcggatattgtgcctgaatttttttgcgcagacgtcccatcagtacatcaatggtatggctttcccgcagctccgcatccggatagagttggagcattaacgaatctttgctcaccactttgccattattgcgtatcaacgtttccataatggtgtattcgaacgcggtcagtttgatcacttcgtcattaatagataattcacggcgagagagatcaacctgaaacgggggtagcgaaatgacctgtgaagccaggccgctattacgccgcattaatgcctgcattcgcgccatcacctcttcaatatgaaacggtttagtcacgtaatcatcagcaccggcacttaatacttcgactttgtcctgccagctttcacgggcggttaataccagaatcggcagtgaaacatcattgctacgccagcggcgaatcagtgacagaccgtcctcgtcaggcaatccgagatcgacaatcgcaatatccggtaaatgttcattgagataataatcggcttctttggcatcttctgcgtcatcgacctgatgaccagcatcctgaatctgaactttaaggtggtgacgtaacaacgcattgtcttcaacaaccagtacgcgcatttttatttctccctgtcttaattattaaaatagtgtaacgcgattatgtgtttatgggggtaaacattaaataaaccagcggggaggggaggtaaagtgaaaaaagaaaaagtggataattttaataaacaggccggacagcatcgccatccggcactgatacgagtttatttcagctcatcaaccatggtgatagctcgaccaatatagttagccggcgtcatcgctttcaggcgggctttctcttcttctggcaacgccagaccatcgataaactgcttcatgccttcggcgtcaacgcgcttaccgcgagtcagctctttcagcttctcgtacggtttttcgatgccatagcgacgcataactgtctggattggctcagccagcacttcccagttgtgatccagctcatccagcagatggtcacggtttacttccagtttgctcacgcctttcagggtggattgatacgcaatcagcgcataaccgatacccacgccgaggttacgcagcacggtggagtcggtcaggtcacgctgccagcgggaaaccggcagtttgcttgccagatgctgcaataccgcgttggaaaggcccagattcccttcggagttttcgaagtcaatcgggttaactttatgcggcatggtggaagaaccaatctcaccagcaatggttttctgtttgaagtggttaagggcgatataaccccagacgtcacggtcaaagtcgatcagaatggtgttgaagcgcgcaacgcaatcaaacaattcggcaatgtagtcgtgcggttcgatctgggtggtgtacgggttccactgaatacccagcgaggtgacgaactcttcgctgaactgatgccagtcaacttccgggtaagcggcgatatgggcgttatagttaccgaccgcgccgttgattttgccgaggatctccacctgattaagctggcggtactggcgctccatacggtaggcgacgtttgccatctctttaccgatggttgacggcgtggctggctgaccgtgggtacgagacagcagcgggatatcgcggtactgaacggcgagatctttaatgccatcaatcagttgacgccagtacggcaggatcacttcatcacgcgcggttttcagcattaatgcgtgggagaggttattgatatcttccgaagtacaggcaaagtggatgaattcagaaaccgcgtgcagttccgggatctccgccactttttctttcaggaaatactcaaccgctttaacgtcgtggttagtggtacgctcgatggttttgatgcgtgcggcatcttcttcgctgaaattggcgacaattgcatcaaggtaaccgattgcgtcggcagcaaaagcaggaacttccttgatcgctgcgtgcgcggccagtttttgcagccaacgtacttcaacttgtacacggaatttcagcaaaccatattcgctgaaaatcccgcgcagcgcgctgactttatcgccgtagcgtccatcgacaggggaaacggcggtcagtgaggataattccatagatcacaactccggggttaaatgagcaagaatttgttttgcctgagtggtcaggcgattacgagaaaacatcagttgcagacgtccgccgccgacctggtgccagagcacggcggcgcgaatgcctgccagcagggttgcgcgaactttcgcctgcacttgtgggctttgcagtacagcaggggaaccggtgacctgaatgcgcgggccaagcgggctgatcacatcaacatagatagcagccatcgcgctcatcagcgtttcggactgtaaatcgaagtgttcgagctggcgttgcaggccgttgatccggttgcccagagtgtcgagcgcgcctttcgctgaggagagtttgcgctcaagcaccatcaagctgagtgtgtagcgggttaattcggcgtttaagccctggcgactgctggcattgagcacgccgagcagggtttccagcccgacgcgcaggttggcttcgctaccgccaaaaaccgccagcgtcgagctggggttcatatcaataatactgttgagtgagacgtgtagcgcatcggcatcacaatgcccctggtgagcgagttgttgcaccaggcgtgccgactgacaaataccggccagggcgagggtgatgtcatagtaattctttgccacgttcactgcttccttgttttaagtaaagataataatcagaccggcagcggcagacgctgctcaataataccgccaccgaggcacacttcaccgttatagaagacggcagactggcccggcgtcacggcggcaaccggttcatcgaaaatcacttcaatgcgatcatcgtccagcgccttgacggtgcaagggatatcggtctggcgatagcgggtttttaccgtgcaacgcatagtgccggtgaatggttcgcgatcgacccagtgcaactgctgggcaatcaacccgacagacatcagccgcgggtgttcatggccctgagcgacaaccagaatgttgttttcgacgtctttgtccaccacataccacggttcttcggtaccttctttggtgccaccgatacccagacctttacgctgaccgagagtgtgatacatcagcccctggtgctcaccaatttcatcgccatcgacggtaatgattttgcccggttgcgccgggagataacggcccaggaactcgcggaatttacgttcgccaatgaagcaaatgccggtagagtcttttttcttcgcggtgaccagaccaagatcttcagcaatcttacgcacctgcggtttttccagttcgccgaccgggaacaggctttgcgcaatctgctcatggctgagcgtataaaggaagtagctctggtctttattgctgtccagaccacgcagcaggcggctcttgccatcgacatcggcccgacgtacgtaatgaccggtagcgatataatcggcacctaaatcttcggcggcaaattcgaggaaggctttaaatttgatctctttgttgcacagaatatccggattcggcgtgcgaccggctttatattcggcaaggaacagttcgaagacgttgtcccagtactcggcagcaaagttaacggtgtgcagttcaatgccgagcttgtcgcagacagcctgggcatcagccagatccgctgccgctgtgcaatattcctcaccgtcgtcttcttcccagttcttcataaacaggccttcaacctgatatccctgttgttgcaacagccaggcagaaacggaggaatcgacaccgccggacatgccgacgattacttttttgcggtttcagacattggatcactcacgacattgaacttcaaggcggcgtattctatcacgcagccttttagatgacaccctttgtaaaaggccagttaaaatcgccaatcatctccagcggatagcgttgcccgctttgataacaacggatactttccgccaccagcggcgaacgaagatttgacgcctttaaaatctcttcggcgctgacccaacgacagcagtcgatatcgctgtcatgaggctgggtcgggcatatttgctcaagctcaatggcaaagaggaaacgcaaaaacggcgttttatctggcgcaatccactgatgcatacgaataaagtgttgcggctgcgcgctgatgccggtttcttcccacagttcacgggcggcggcttccactaaggtttcatcggcttccagatgcccggcaggttggttccataacgctttaccattaatcgtctcttcaacgactaaaaatttgccttctgcgtgcaccacacaagcaacggtaacgtgcggtttaaacattttgcatccttaatctgtcacttctcgccattcgccattggcaagattatccaaagagtaatctcccatcgcatagcgaatcagtcgcagcgtggggaaaccaacatgggcggtcatgcggcgcacctggcgattacgtccttcatataaggtgatcttcagccagctggtgggaatacttttgcgttcacgaattggtggattccgcggccataaccacgctggttcgccaaccagctccgcgccggcgggcagggtagggccatcatttaaggttacgccattgcgcaaggcttcaagtgcgtcttgtgtgggaataccttccacctgcacataatagattttcccggtgcgtttacccggctgggttaaacgcgcctgcaacgcgccgttattggtcagcaccagtaacccttcgctatcgcggtcaagacgacctgctgcataaacgccctgaaccgggatgaattcttttaatgttttgcgtccggcttcatcggtgaactgcggaagaacatcgtagggtttattgaacaggatcacacgcgtgggctggttttcaggtttacgcctggtagaacgttgcgagctgaatcgcttaacctggtgatttctaaaagaagttttttgcatggtattttcagagattatgaattgccgcattatagcctaataacgcgcatctttcatgacggcaaacaatagggtagtattgacaagccaattacaaatcattaacaaaaaattgctctaaagcatccgtatcgcaggacgcaaacgcatatgcaacgtggtggcagacgagcaaaccagtagcgctcgaaggagaggtgaatggaaagtaaagtagttgttccggcacaaggcaagaagatcaccctgcaaaacggcaaactcaacgttcctgaaaatccgattatcccttacattgaaggtgatggaatcggtgtagatgtaaccccagccatgctgaaagtggtcgacgctgcagtcgagaaagcctataaaggcgagcgtaaaatctcctggatggaaatttacaccggtgaaaaatccacacaggtttatggtcaggatgtctggctgcctgctgaaacccttgatctgattcgtgaatatcgcgttgccattaaaggtccgctgaccactcctgttggtggcggtattcgctctctgaacgttgccctgcgccaggaactggatctctacatctgcctgcgtccggtacgttactatcaaggcactccaagcccggttaaacaccctgaactgaccgatatggttatcttccgtgaaaactcggaagacatttatgcgggtatcgaatggaaagcagactctgccgacgccgagaaagtgattaaattcctgcgtgaagagatgggcgtgaagaaaattcgcttcccggaacattgcggtatcggtatcaagccgtgttctgaagaaggcagcaaacgtctggtccgtgccgcgattgaatacgcaattgccaacgaccgtgactctgtgaccctggtgcacaaaggcaacatcatgaagttcaccgaaggcgcgtttaaagactggggctaccagctggcgcgtgaagagtttggcggtgaactgatcgacggcggcccgtggctgaaagttaaaaacccgaacaccggcaaagagatcgtcattaaagacgtgattgctgatgcattcctgcaacagatcctgctgcgtccggctgaatatgatgttatcgcctgtatgaacctgaacggtgactacatttctgacgccctggcagcgcaggttggcggtatcggtatcgcccctggtgcaaacatcggtgacgaatgcgccctgtttgaagccacccacggtactgcgccgaaatacgccggtcaggacaaagtaaaccctggctctattattctctccgctgagatgatgttacgccatatgggctggactgaagccgcagacctgattgttaaaggtatggaaggcgcaatcaatgcgaagaccgtaacctatgacttcgagcgtctgatggaaggcgctaaactgctgaaatgttcagaatttggtgatgcgatcatcaagaacatgtaatcactacatgtgtttaatattgcaacgggcgtataacacgcccgttgttttatttatgtaggtattattaatagcatatcgagcatatttatataaaaccctttacttgagcccatatgggcatatttttataatgcaactattatgcaaacatttatttgttattttgctttctcctggaggacactcttgactgcttttgagtagactccataaatccttgttgaatggtgcgatgttataaatagtaataggatattctttatctttaaggataattccagatttaaccggtgtaaatatactgccaggagggagaaatatagtagattgataccagatgatcattttcatattaccccatatggctgaaaaagatatgccgcatgaaggttgaattatcgtgtcaattactatccacttcatttgttatgtcttatcctacggtatttaatatagttcatttggatgttcatttctttattttgcatatgagtatattaccccttcaaaaaataaattaattaaaacgattgcttatataaaacaaaatttaaagcaaggaatctcaatggatgttaaacaaaatgagatttagtgaaaacaataaattattcacttcgttttagatttgtttagctataatgttatacattcaaatgactgaacatcctgtaattaaaacatagcctttatgctactttgtgccaatttgctaaacattatggttgcctttttatataacgataataatgaatataagcatgacatgagaataaggtttcaatttttgagttatataggaaaggtttaacctgttcctggctaaaatacatataactggatgatgactaaaccaaaacacatgtacgttaagtattgaaacgggcgtatggcacacccgttgtttttataaatatattaaccgttataaaataacgtatagaaagtcaagtgatcacatttcaaatatcaatttgatagtattggcatggtgattatttatgggtagcaataaaaggacagtatttatcatccatagggatagtctctgtacttttattcccattatgctaatgccttactgaattatgaagcatttcttaagcatccaactttagctagattaatggtttattattttctacatcttcaatatataaaagcgtattatcaatggcgtagtaactgcgtttgttatgattaacatcagtaacccaccggaaaacgcccgcgcctgctagtgttgaacagtattcccgaaatgtagattttccgcaaatatgaagcaatgcggcctcttttattttagcagggttcttggtcgtactaacttttaacaggttcctggttcctcttaataacaaaaccgtgtcatcgtgagtaataattctgatgttatccgtagccagataataaatgtaatgtgcaatacggtgatgttttaattctgaataaaaccaggagaagttttgctcttttctcacttgctcaaacatcttttgaaaaacaacgacctgatccatcaggataataacctcttgttagttgtgagactgcgtagtgtgcacgatcggttttaccacttcaatctggtctgtcctttggctgtgatatgtacagagtgtgatagagggaatatctgaattctcccggtgagcattttgcaacggaccagctccggtacaaacgctgttgtgggttcagattataacattctgtctaaggggcgggataaaggtgaaattagggggcatgaaagatgactttataaccttgctcaccccaatgttgtaaaagttcgttttgccttctcgttggtgccatgcctgtccagacaatcaatgtttgcgtcgggaacagttccgggcgcggcgattcaatgggatcagcaagaacagaaatgtgccatcctgacaatgataaacgccatgcttccagccacaatcgtgctctctcttcaacattccacgccatcagaatggcttctttaccgggcttacggcgcatttcgaaaagcgaggttgctgcgtattcaattaatgcgccgtcaaacatactgctcataatgcgggaggtgttgtgatcaagcacgagacgctggcgaacaggaaggtaaacatgattaatcaattgatctactgggtactctcgacccagtgaaataattctcgcgcgtagtttggcaggattagccatgcgaagaattgacatcatctcttcttgcaggcggctccagtcatcttccgtatcctggctggtggtttccagtaatgctttaactttgcctacagggacgccattacttatccaacgcttgatctcttcgatgcgttgtatgtcttcttcatcaaagagtcggtgtccgccttcactgcgctgtggttttaacaaaccgtagcggcgttgccaggcccggagagtgacaggattaatcccgcaacgttcagcaacatcaccaatgctgtaataagccacaattcctccttgcggtcacaaatctccgtcgcctgtacacgacccaataatactttgtacaatatacgctaaaattgtacaaagtataaataagatttcagctaaattggatgaaacattatttttaatgtggattaaatttaaacgtaacgtattcattttcacgatgatttactgaaatcatgtgaaagaatgtgctgaaaattattttttctctggccacgctatggaagggataccattcaatttagctttagcaaacagatctccctgaaacatctcaattcctgcggattcaagccacatccactcttctggtgttgccacgcccatagcactgacttgaatttcaagtgatgtacagcattttatgatcgcttgaataattgcctgccgtggcccgcttttatgaacattggtaatcaattcctgactgattttaattctgtcaggctggaagcgtgacaggagtaacaaaccggcaaaacctgcgccaaaatgatcaattgctacactgataccggcagccttaagcgatttaatcgcttctgcaaactcatcaaaccgagatataacttcactttcagtaaattcaacgatgatttgttcaggcaccagagcattggcctttatttcatcaagtaaaaaagagactgcgtcaggttcgttaaccagggtcataggtaatagattgattgaaatcattttatcaccgagctcaagtgcgtgtgccatcgcgaatgcaagcgccttacttttgagatccgctgtgtagatttccccgtctttacgctgcccaaccgctatggctgatgggctatcttcatttttttgcacaatggcttcaaaagcgattatccgccgcgataagggatcgacaataggatgaaaggcaaagtggtcgtttatagttggtgaaagggtacaggaatcaagttctttatcagatccgtcagcgataaaaagccaggagtcttcggcagggatctcgaaataggttgattgttcggttgcaaggacaaaagtacgaaaaaattgtagcgctctgtcatcataagttagctgaaattttgatgtgcctttgtcgaatacggcctgtaaaacgtcatctcgctcgtgcaggcgcaaatcaaataattccattcccgctttgccaaaacggcgagcaggcgcgtaatcgcacagcagctcaacaatattatagtgccgtggatcctggcatatagcccgatatatcattttaacctgttcttccggaccttccagaagctggaaaaaatgagaaccattaaacagtaagatccctgttacgtcagactgcatgttcctgcgatttgctatcgaaaccatttcttcgattttttgacaggttcgtcgtcacgtatatggctacgataaataagggtggtaagcattaacaatccagggtaatgggtgaggcgagagtaagacggtaacagacatatcttcttgtgtctttcttttaataccaaaacataaccgtttctttacattgataaaaaatggaaaaagttgaacactagttggcgaaaaatcttgtatagattgtcagttaaatgatgcaatatgttttatcataacacattgttttatatgcattagcactaattgcaaaaaattaatttatcattctgtacacatatttcgtacaagtttgctattgttacctcacttaacattgattaacatttttaacagaggcgtagcatgcatcaaaattcagtgactttagattctgcgggagcaatcactcgttactttgcaaaagctaacttgcctactcagcaggaaactctcggggaaattgtgactgagattttgaaagatggacgtaatctgagtcgaaagtcgctttgtgccaaacttctttgccgactggaacacgcgactggggaagaggaacagaaacattataatgcactaattgggttgctttttgaataatgcaacagcctgattatttaacaggttagctatgaagtcgttatgaagacatctgataatgaacgtataaaatatgaaattactggccaggcggtgatccagatactgcgcatgaagataaatttttcattgcagactcttattaagcaattactcgtaatgaaatcggctgaggaagatgctttccgacgcgatttaattgacagcataattcgtgattttagcaatagtgattcaggagggccaaaccgaagaacagcgacagctgacaataaaagtatgttcaatggtaagaaaataaacagaatacattaaaatttcataagtaagatgagaggttaccatgcttgaagatactacaattcataatgcaataactgataaagcgttagcaagttactttcgcagttcgggtaatttgttagaagaagagtcagctgtgttagggcaggctgtcaccaatttaatgctttcaggcgataatgttaataataaaaatattatcttaagtctgatacactccctggaaacaacaagtgatattctcaaagctgatgtgattagaaaaacactggaaatcgtgttgcgatacacagctgatgatatgtaacttctaattattaagtataagtttatagaaaactcattcatcttatttttgtctgtcgctttagactatacacagcataattttattgggttaatatttctacgaggctgacatgaataattcaatcccagagagatttatttttcaatgtgctttgtttaaaaatctcgagagggaggtgttcatgacgcatgggtatgttgatagtcatattattgatcaggctttacgcttgcgtttaaaagatgaaaccagtgtgattctttctgatctctatctgcaaatattgcagtacattgaaatgcataagactacactaacggatatcattattaatgacagggaatccgtgctctcttagaacttgagtaaggttttagaataaacatcagctgtatcaccatgctgatgcaaagtgagcatttcaggcgttatgctttcttattatgtccgcaatatcaggtgtcaagaatggagagttctcgctctccattcttgacgcctgatatcccgcctaacttattttgtactgcctacattatgctcaataattaatgggttagatcaagatggagaaaattttatcttcggcgtggatatttcttatgctctctaccatgctctctgtagatgccagcgcgagcgaatgaatggcattttcatgtattaaaccctttggccgggacaagcaaatgcgcaatacactcatacccatcctcgttgcgatatgcttgtttattaccggtgtcgctattttgaacatccagctctggtattccgcaaaagcagagtacctggcgggagcgagatatgccgccaacaatatcaatcatatacttgaagaagcgtcacaagcgactcaaacagcggttaacattgccgggaaggaatgcaacctcgaggagcaatatcagcttggcactgaagcagctctgaaacctcacctgcgcacaatcatcattctcaaacagggaatagtctggtgtacatccctgcctgggaatcgggtcctgttgtctcgtattcctgttttcccggacagtaatttactgttggctccagcaatcgacaccgttaatagattacctatcctgctctatcagaaccaatttgcagatacgcgcattttggttacgataagcgatcagcatattcgtggggcacttaatgtacccttgaaaggggtaaggtatgtattacgcgtggcggatgacattattggaccaacgggtgatgtgatgacgcttaatggacattatccctataccgagaaggttcactccacaaaatatcatttcactattatctttaacccgccgccactctttagcttctacagacttatcgataaaggctttgggattttaatatttattctgttaatcgcctgcgccgctgccttcctgcttgatagatatttcaataaaagcgcaacgcctgaagagatcctgcgacgggcaataaataatggggagatcgtccctttttaccaacctgtggtaaatggtcgggaagggacattgcggggagttgaggtgttagcccgctggaaacaacctcacggtggatatatatcacccgcggcatttattccacttgctgaaaaatccggattaatcgttccgcttacgcaaagcctgatgaatcaggttgccagacagatgaacgctatcgcgagtaaattgccggaaggttttcatattggaattaattttagcgcttcgcatattatttcgccgacgtttgtcgacgagtgtttaaatttccgtgacagttttacccgccgcgatttaaaccttgttctggaagtcaccgagcgtgagccattgaatgttgatgaaagtctggttcagcggttgaacattctgcatgaaaatggttttgtcatcgcgctggatgatttcggtactggctactcagggctttcttatcttcatgacctgcatattgattatatcaaaattgatcacagtttcgttggccgcgtaaacgcagacccagaatcaacccgaattctggattgtgtattggatctggcgcgtaaactttcgatcagtatcgtcgctgaaggtgtcgaaacgaaagaacaacttgactatctgaaccaaaataatatcacatttcagcagggttattatttctataaacctgttacatacatcgacctggtcaaaattatcctttctaaaccgaaggtgaaggttgtggttgagtgaaaattgatcagtaaggccatagtgcggtgtaattatagacagctaattagctcgttgcctcttgttactattgttcattattttgtttgctataattgtttgaaagttttgacaggattgccattagtagcatgaacaatagtaataatctggattatttcactctctatatcatcttttccattgcatttatgctgatcaccctcctggtcatccttattgcaaaacccagtaccgggctgggagaagtgcttgtgacgataaatttgcttaatgcccttgtttggctggcgatcaatctggttaatcgattaagagaaagactcgtcaaccacagggatcagcaataatctttcagtttctcactgtcagtatgcggctgaatgggttgctggcagtgaacgcctggatcattgaaggaaaggcattattgcgcaaatagttgtcaaccctggtgttatcacggttgtttttatatatcaccgaaataatcctcatcgcaactattaacaattttgatgtcgaagagttatttgttaaacaaaatcgtcaccctaaagtgatcaatgtcatgaaaataaggtgaaaaatgataatgccgacttatttatcatttatatattgtcgctgtttatctatttaaattttttgtgcttttgtttttgtctttaccctccgttttggtaatctgaacgcataggttatttgaccaggaatgtttgttaatccaatgaatggatggttaatctatgaaactgaaaaaactctccgggtttagtttgggacttattgctctggcggtgggtaatgcatatgctgaacagtttattcagcacgatgaatataaacatgctgtggcaataaaagatggaaaagtaaaagatattgataatgcgctagttataacaacgggtaatggaagttacgggtatccgttgcaggagagggtagcaagttaaccattaacaatggcgtcattgtaacaacgggcggtttatatccttctgacaatagtcctctaagcacagcattaacagctagcgcaatcgtaagtgaatttggcggtgctgttattttgcagggtaaaaacacgattgtcacaacgggggatgatgctgccaacttactgatttagtgtatgatggtgtttttgaggtgctccagtggcttctgtttctatcagctgtccctcctgttcagctactgacggggtggtgcgtaacggcaaaagcaccgccggacatcagcgctatctctgctctcattgccgtaaaacatggcaactacagttcacttacaccgcctctcagcccggtaagcaccagaaaatcattgatatggccatgaatggcgttggatgccgggcaactgcccgcattatgggcgttggcctcaacacgattttacgtcacttaaaaactcaggccgcagtcggtaacctcgcgcatacagccgggcagtgacgtcatcgtctgcgcggaaatggacgaacagtggggctaaatcggggctaaatcgcgccagcgctggctgttttacgcgtatgacaggctccggaagacggttgttgcgcacgtattcggtgaacgcacgatggcgacgctggggcgtcttatgagcctgctgtcaccctttgacgtggtgatatggatgacggatggctggccgctgtatgaatcccgcctgaagggaaagctgcacgtaatcagcaagcgatatacgcagcgaattgagcggcataacctgaatctgaggcagcacctggcacgactgggacggaagtcgctgtcgttctcaaatcggtggagctgcatgacaaagtcatcgggcattatctgaacataaaacactatcaataagttggagtcattgtcacaacgggggattactcaattggtttgctaagtcaaacgagtggaaacctgaatactgacaccataataagagtcaactctgacggttcggttaccccctctttttctgacggagatgatacatttattgttactgcgggtaatcacgcagtcggcgttcttgcgtgtgcatctcccggaagcgcgcgtgcgtgtgtatcttctcttgatgaagaaagtactaccgatacaggaagtaatgaaaataatgccatagcaaaactggatatggcaaaaggggagatcacaacccacggaacagaaagttatgccgcgtacgctaatggcactgtcgtcaaggctggtgacacgcttgattataccaatgccagcgttacattaaccgatgttgatatcaccacgcatggggacaatgctcatgccatcgctgcccgccaggggacagtttcatttaaccagggagaaatttatacaacgggtcctgacgccgcgattgctaaaatttataatggcggcacggtgacgctgaaaaatacatctgcagtcgcgcatcaggggtctggaattgtgctggagtcttccataaatggtcaggaagcaacggtagatattttatctggtagctcactacggtcagcaaatgaaatcctctaccataaaaatgagacgagtaacgtgaccattacggatagtgaggtatcatcggctgcagatgtttttatcaataatattaaaggtcatttgaccgtcgatgcaactaattcaaaaataacgggttcagctaatatttcaacagatgataacactcatacctatctgtcgctttcagataatagtacctgggatattaaagctgactcaacggtgagcaacctcacggttgataatagtacggtctatatttcccgggcagatggacgggatgtcgaaccaacaagattaacaataactgaaaattacgttggtaataatggcgtattgcatctcagaactgaattgggtgatgataattcagctacggataaagtcgttattaatggaaatacctctggaacaacccgagttaaagttaccaatgcaggaggcagcggagcttacacgttaaatgggatagagattatcagcgttgagggggaatcaaatggggaatttattaaggattcgaggattttcgccggtgcctacgaatattcattaacccgaggtaataccgaagcgaccaataaaaactggtatctgactaacttcctggcaacgagcggcggtgaaacaaactccggaggaagttcagcgcctactgttgcgcctacccccgtcctgcgcctcgaagctggaagttacgtcgccaacctggcagccgctaacactctttttgttatgcgtctgaacgaccgtgcgggtgaaatgcgctacatcgatcctgtaactgaacaggagcgttcaagccgactttggctacgtcaaattggcgggcataatgcctggcgtgacagcaacggacagttgagaacgacctcgcatcgctacgtctcgcagttaggggccgagctgttaaccggtggttttaccgacagtgacagttggcgtttgggagtgatggctggttatgcccgcgactacaactcaactcattccagcgtgtcggattatcgttcgaaagggagtgtcagaggctattgcgcagggctgtatgccatttggtttgccgatgacatcagtaaaaaaggcgcatacattgacgcctgggcgcaatatagctggtttaaaaactcggtgaaaggggatgaattagcctatgaatcctatagtgcgaaaggcgcaaccgtctcgctggaagcgggttacggctttgccctgaataaatcctttggtctggaagcggcgaaatacacgtggatattccagccacaggcacaggctatctggatgggcgtcgatcataatgcgcacaccgaagccaatggctcacgtattgagaatgacgcaaataacaacatccagacccgacttggtttccgcacctttattcgtactcaggagaaaaacagcggtccgcacggtgacgactttgaaccttttgttgaaatgaactggatccataacagtaaagattttgctgtctcaatgaacggtgtgaaagtcgaacaagatggggcgagtaatttgggggaaattaaacttggcgtaaatggcaacctgaatccagcggccagcgtctgggggaatgtgggcgtgcagctgggtgataatggctacaatgacaccgcagtgatggtgggcctgaaatataagttctgatcccgccgttagctaaaaaaccgcgtcgtattcatcgacgcggtacatatgaaatattattttttgccgatagcacgcatggtgtcatcaattgccgtgatcaacagcatttgcgggtctttagcgcaaacctgattcagtttttctaccactttggcgctcagttccggagattgctcaatttttaaatcacggctggcaacgctggcattacccattaccgcaacaatttctgcaacctgtgcgctgtcagtttttgccatttcgttggcttctgcgcaagtaatataggtttctgacggcaaaccgtttttaatattgtagtcctgcgcccaggtcattggtgcgaaaacaaacaggcccgccagtaaagcaaattttttcatcatcattccttatttcattttacccagaattgcaccacccgtaccgccaatcacggcacctttaatcgccccttcgaggccattgccggtcagaacgccagtgacagcaccaacggcggcacctacttttgcacctttacgcgcatttttaccgtcgcggcctttttctgttactgcaccaacaccagcgccaacagctgcacctttcagtacgccattaacaccattgccagtaagtaaaccaacgcctgcgcctagcaatgcacctttcgtggtgcgattcatatccgccatcgctggcgtggagcagaacaatgctgagataagcccgaaggcaagtatttttttcttcaacttagatgtccggtattaagtaagttgcacacacaataatttcgtcttcaattaagatctgcttaactaaagaacgctcgctattattcagataattcaaaatgagcgtggctgtgatgataggaattatgttttttacgtgaatgagaataatcttaaatgaggaataactcattgattgacaatatttttattcaagaagtgtcattgactgttaacgcaatgttgtaaaggtaagataatctgatttatcaatattattgtgtgatttttatgtgagcagaagatattcatcagcaacgattacattagtcattttattttgccgacggcctcattgtcgaaagataagcgtacgacagtattatctgaaaagagtgattttttatccaactacacttcagcgcactgcgtgtaaaaaatgcctctttcttatgcgggatatcatcatttcatcatgatgtctttggtgagcggtgaacacaatacacctgcgctgtctcttcaggatgaatcccctggtctggtgcctgcgggctgatgttgcagcagagcttaggtcacttagacgctactatcatttatccaatggcatggaatcgaaatcagtcgatacccgcagtatatatcgtgaactgggtgcaacgctgagttacaacatgcgtctggggaacggtatggaaattgaaccctgcctgaaggcggctgtgcgcaaagaatttgtcgatgataatcgggtgaaagtgaatagtgacggtaattttgtcaatgatttgtcgggcagacgtggaatataccaggcaggtattaaagcctcattcagcagtacgttaagcgggcatttcggggtggggtatagccatggtgccggtgtggagtccccgtggaacgcggtggctggtgtgaactggtcgttctgaccatcaacgattaaactgcgcttcggcgcagttttcgtttacaggatgttgaaagagaaaattctggggcaaaaaaagcccgccagttacggcgggaaacctcatcctatgggagaacaatgaataatgaaattgcggggttatcatctcccagtatatccacactaacaacagggttatttactcaaccaggcataaacattttgttctgtgcgtgggaacagccttaaggtgtaaagggggaggtggaaatagcaatgaggagtatcagcaagaatactcgccgctttaccacaacgtggatgagagggatgaaaaactcaaggcagaaatgactctgccttgaagataaatgcgtttttacagcgggcttatttcagctcttctgcttccggtaaggtcacgttcagctcaagaatagaaatatcgccatctttttgctcaagctgtacggttaccatctcaggatcaatttgtacgtatttacaaatgacctcaagaatatctttacgcaactgcggcagataatgcggttctgcatcgctgcgacggcgttcagcaacaataatctgcagccgttcttttgcaatgttggctgtgtttttcttccgcgagagaaagaaatcgagtaatgccataacttatcctccgaacaagcgtttgaggaagcctttcttctcttcttcaatgaagcggaaaggacgttcttctcccaacagacgttctacggtatctgcgtaggctttacccgcatcggcgttaatgtcgagaatgaccggttcaccctggttagaggcgcgcaatactgattgatcctctgggatcacgccgacgagtttgatgcgcaggatctccagcacatcttccatgctcagcatgtcacctctgcttacgcggcctgggttatagcgcgttaacagcaggtgctctttaataggctcttcgccattttctgcgcggcgtgatttcgacgccagaatgcctaaaatacggtcagagtcgcgtactgaggagacttccgggttggtggtaataatggcttcgtctgcaaaatagagtgccattaacgcaccggtttcaatccctgccggggagtcacaaacgataaattcaaaatccatcgctttcagatcatcaagaactttggcgaccccttcacgggtgagggcatctttatcgcgtgtttgcgatgccggaagaatatagagattttcagtacgcttatctttaattaacgcctgatttagcgttgcatcgccctgaatgacgttgacgaaatcgtaaacgacccggcgttcacaacccataatcaggtcgagattacgcaggccgatatcaaaatctatcacgacagttttctttcccttctgggccaaaccagtggcgatggccgcgctggaggttgtcttaccaacaccccctttgcccgaagtaacaacaataatgcgtgccatagaaattccttgttaaaaagggatcaatttaacggttgaacggtcaaagcgttttcgactaactgcagtcgcgccgctttgccataaaattctgctgggatttgatcactcagccagtattcacctgcgatggacaccagttccgccatcaggttcgtacaaaatatttgcgtttcccggtcaccacttgcccctgcaagcgcacgaccgcgcatcatgccatagacatgaatgttcccatcggcaatcaattcggccccagcgctaacgtggcttgtaacaatcagatcacattgtggagcataaatacgctgaccggaacgcaccggggtatctattaaacgcgtttttgtgaccggcgttgtattttgcgctggagcctgtggtgcgggagctggacgcggcgctttttcctttccttccgtcaggataggcagccccatcttttcaatttcggctttaagttgcgcatctttgcagccacttacgccaataacccgcaaaccggttgccgaaaccgccttatgcatcgctgaccagtttaccgggtcttccagtgcactgacgttgagtacaacgggggcatgttttaaaaatgcgggggcctgagcgattttgtcttccagcgcctgatggataaccttaggttctgcctcatgcagatgaaccacagataaagtgaagctactgcctttaagctcgattggcgtgtttgacatcctggccttactcaattagctattaatcatcgccagcgcgcgatgatgttccgaagactataaggcatgttatagtctggattatattgaggcaagtcaccctcccatttattcagagtaaaagtctattctgtgataaatggcgctgattcatagcttaaaaaatacccttgtcaatcaacccattgccgtcgtacttttgattgttcttatttacgcttcctttttccgcaccctaatcgtgacagcatctccagacctgtttaaatatccagtattgaggcaagtgtattttttcaccacgccaggctttcttaactttccattttttgcggcatcattaaagaacagatacccgttatcttaatatccgccacagaattgctctatcatagaaaccgcagaagacgtctgatacttctgtcaggtcatcgtaactcgtccaggtcagcggttttgattacggattgatgatgaaatgagcataagtgttgtacggttggattatcaggatgtgctatgaatatgatgcgtattttttatatcggattgtcaggtgtggggatgatgttctcatcaatggcgtctggacatgacgctggcggacttcaatctccggcgtgcggcgttgtttgcgacccgtatatttgtgtgaactcagatggcatttccccagagttaacaaggaaatatctcggcgaaaaagccgctgaaaacttacaatcattacaaggctacgatcccagcgaatttacattcgctaacggtgtattttgcgatgttaaagaaaaattatgtcgtgatgatcgttattttggtgtggatggtaagcggagtggaaaaatcaatcaaatcaccacaaagatgttatttatgtgtcgtgagtgatgccttgtttacattatgttctattcggcattgtctgctattcgtcattaacctcttgagcgacagagaggagtggggcgttaacgtttatgacggggagagtccccgtcggttgacatttacttaatttgaatatcgacgttatattttttagttttgtttttacgggcgtcgtttcgggtttgcagcactcgcagctcatatttgccagaagcagggagtgagtattgtccgtgactatcgagttctggtgaatatctggataaatcaactgaatcatcgattcctggcccgaagaggtaagtatcagcgccttcattagagatactcacatgcactttctgacctttttggcatagaaggtatatgtatcgtaatcgtatccctttatttcgccggagtactgagcgctgctatggcctttgctgaactcaacattgacattcttacccgcagcaaagctcgtggaggttagcagtgcaagcagcaatacagccttactgatgctcttgatttcattggtagtctcctgttcagaatgagtacgatgaactgttataatataacaatcccttacgggagaattccagtggcttttctgcgttcggtaaaatcccggcgcggcattttttgccggggggattacttataaaggggcatggactcaacaaaccgtagaaatctacagctggctggcttgtggcgcgggtttcattgatgttagcttatgccaaaacctggcatcttaaagagtaaaagtatgttttgtgtgatttatcgaagcagcaagcgtgaccagacctatttatatgtcgaaaaaaaagacgatttttcgcgtgttcctgaggaactgatgaaaggttttggtcagcctcagttagcgatgattctgccgttggatgggcggaagaaactggtcaatgctgatattgaaaaggttaaactggcattaaccgagcaaggttactatttgcagttaccgccaccacccgaagatttgctgaagcaacatctttccgtcatggggcagaaaacagacgacactaacaaataaccgatatccggcggtggcattatctttgtcggcgcgggttttcatatccacgataaggtgaggggaacgttatgtatcaacatcacaactggcaaggtgcgctgctggattatccggtgagtaaagtagtctgtgttggcagtaactatgccaaacatattaaagagatgggcagcgcagtgcccgaagagccagtgctgtttattaaaccagaaacggcactgtgcgatctgcggcagccattggcgatcccatccgatttcggttcagttcatcatgaagtcgaactggcggtgttgattggcgcgacgctgcgtcaggctacggaagagcatgtccgcaaagccattgccggttatggcgtggcgctcgatctgacattgcgtgatgttcagggaaaaatgaagaaagccgggcagccgtgggaaaaggctaaagcgtttgataactcttgtccgctttccgggtttattcccgcggcggaatttaccggcgacccgcaaaatacaacgctgggcctgagcgtaaacggcgagcaacgtcagcaaggtacgactgcggacatgatccataaaattgttccgctgatcgcttatatgagcaagttttttaccctcaaggccggtgacgttgtgctgacaggcacgcctgatggcgtcggcccgttgcaaagcggtgatgagctgacagtcactttcgatgggcattctttggcaactcgcgttttgtaatactttttgccgcctgaaagcggcggcaaaacttgcatcgctgtgccagactggttataaggtgcgttttaacgtaatggcggaacacctgatgagcgatgtacctttctggcaaagtaaaaccctggacgaaatgagcgatgcggaatgggagtcgttgtgtgatggttgcggtcagtgttgcctgcataaactgatggatgaagacaccgacgaaatctacttcactaacgtcgcctgtcgccagctcaatattaaaacctgtcaatgtcggaactacgaacgtcgtttcgagtttgaacccgactgcattaaattaacccgtgaaaatctgccaacattcgaatggctgccaatgacctgcgcttatcgtttgctggcggaaggtaaagatttacctgcgtggcatccgctacttactggttcgaaagcggcaatgcatggtgaacgtatctctgtgcgtcatatcgcagtgaaagaatcagaagtgattgactggcaggatcatatcttaaataaacctgactgggcgcagtgataaatttaatagatgttgatgggggctttcttaatatacgtctggatgctcgccatttcgtagccctgtttttgaaagcgctctgtcataatgagagttacccgataccttattatcaacaggtaactctcaatctttaaaaaacgtctgtgtttttaaatgtgataaaccttataccttgagtacatggagagaataatcgcttatcagacttcaggtacctcaaagagtgtctttttaccgtgtcttttctgatactcattacaggtgttaatcattttttttgccgcttcttttagcaaagaaagcattaaatcatcataatcaacatagaatctggttgtttcagtttccgtttttatctccccgatggcggctatttcggtggttaatttcaatttggcggcatcgatatctttattcgcttgtttaaccgtgttagacagggtggtaaagaaattctgcacagattttaacttgttcttcaattctggaatcagtttcccttcaactacgcccgcagcaatagaataggaaatgattaatccaaatggaccggcgacgacaccggctgcggcaccggcatacgcttccttcctgattttatctacctgtgactggaaaagctgcttttttctgaaaaatcattggttaactggctatctaacgccagcagtttcccggaagcgttgttgaaactttgtgagcttaccagcagggatttttgcgcttcattcagcttcgtgatgccgtcatccagtaccttaatgagaatgtctttctgggcggatgctttcttctcattgtactcatcaaatagaaaaatatacgctgcgagcaattgcgtcgcaacaccacaccattcatacactgtttgggttgcttcaaaatacttatcctggctatccataagtaaggttttaatatcgccgactaaaacggaggctgcctgtgaatactcctgtttaaagcgacttaactcttttatggtttcatcaaaggtctgctaggggatgacctgatcgagatatttattataaagatctaatgctccatctgcagtttcgattgcgtttttaactacttctaccgttttatctgcaacgatttcagtcataatcattcgcctctttaaatatataaattgtaatgaaactcctgttttacaactattaataaattttacttcatctaattcatagttagccgggcgggatgcgtcaatgtctttatttctattaatatgataaatatcaaacaatgtttaatgtcattatggcgaatgcttctattctatttttttgccgggtgatatttttcatttctgctggatgagcgtcgtcgccagaaggccacgtgagcacaggataagagaacgaaaaatcagcagtctatgcagcgacaaatattgatagcctgaatcagtattgatctgctggcaagaacagactactgtatataaaaacagtataacttcaggcagattattatgttgtttatcaagcctgcggatctccgcgaaattgtgacttttccgctatttagcgatcttgttcagtgtggctttccttcaccggcagcagattacgttgaacagcgcatcgatctgaatcaactgttgatccagcatcccagcgcgacttacttcgtcaaagcaagtggtgattctatgattgatggtggaattagtgacggtgatttactgattgtcgatagcgctattaccgccagccatggtgatattgtcatcgctgctgttgacggcgagtttacggtgaaaaaattgcaactacgcccgacggtacagcttattcccatgaacagtgcgtactcgcccattaccatcagtagcgaagatacgctggatgtctttggtgtggtgatccacgtcgttaaggcgatgcgctgatgtttgctctctgtgatgtaaacgcgttttatgccagctgtgagacggtgtttcgccctgatttatggggtaaaccggtggttgtgctatcgaataatgacggttgcgttatcgcccgaaacgctgaggcaaaggcgctgggtgttaaaatgggcgatccctggttcaaacaaaaagatctgtttcgtcgctgtggcgtggtttgctttagcagcaattatgagctttacgcagacatgagcaatcgggtgatgtcgacgctggaagaactatcgccccgcgtcgagatttacagtattgatgaggcattctgcgatctgacaggtgtgcgtaattgtcgcgatctgactgattttggcagagaaattcgcgcaacggtgctacaacgtacccatcttactgttggtgtggggatcgcccagaccaaaacgttggctaagcttgccaatcatgcggcaaaaaatggcagcggcagacgggtggggtggtggatttatcaaatctggaacgccagcgtaaattaatgtctgctctccccgtggatgacgtctgggggattggacggcggatcagcaaaaaactggacgcgatggggatcaaaaccgttctcgatttggcggatacagatatccggtttatccgtaaacattttaatgtcgtgctcgaaagaacggtgcgtgaactgcgcggcgaaccctgtttgcaactggaagagtttgcaccgacgaagcaggaaattatctgttcccgctcgtttggtgaacgcatcacggattatccatcgatgcggcaggccatttgtagttacgctgcccgggcggcggaaaaacttcgcagcgagcatcaatattgtcggtttatctccacatttattaagacgtcaccatttgcgctcaatgaaccttattacggcaatagcgcgtcggtaaaactgctgacgcccactcaggacagcagggatatcattaacgctgctacgcgatctctggatgccatctggcaagcgggccatcgctaccaaaaagcgggcgtgatgctgggggatttcttcagtcagggagtcgcgcagctcaatttattcgatgacaacgcaccgcgccccgggagtgagcaattgatgacggtaatggatacactgaatgctaaagagggcagaggaacactctattttgccgggcaggggatccagcaacaatggcagatgaagcgtgccatgctttcaccacgttatacaacgcgaagttctgatttactgcgggtcaaataaatatagcggcaggaaaaaagcgctcccgcaggagcgctgaagggattagcgaccgaacaggtcacgttttttcgctttaaacggctgggaaatcaccaccagcaccgcgacaatcaggtaagcgataaaaataccgagcagccactgcggcatttccagacctaaaaaatcccactgacgctcggcgcaatcgccagaggcgacaaacacttgcggcacccatttatccagcggcagccattccgggaaacgaaccataaaatcacaggtggcaaacggcgaaggatagagctgaagcatggtgtgctcgtaagttaactgcacaccgcggaacgcactatacaaccagataaccatcgctacataacgcagcggagttttcggggcgatcgcgccaatcagcgcagcacccagaacgccgaataacgcgcagcgttcataaatacagagcacgcaaggtttcagtaacatcacatgctggaaccacagcgccgtcagttccagtgccagagcagtaaacgccatcaacagccacgcgccccggccttgtgaacattggttcaaaaatcgcaacataatcatttccctgcaatatgcatagagtgcgcagtttaaaccaattcattcgctgcgccaccaggaggcagcaaaaataggacgcaattggacaattatcgggcgaaaaggcaaaccgggcatttatatgcccggtaagttgttatcaaagcgttgctatccagcccatttgcataaaccattcggttacaggggcaagcgtaaactcgacgcagagcaagccgacgagtgtcaggacgagggtgtaaggcagggccatccacaccatgcggccataagagaggcgaatcaatggcgcgagtgcagaggtcagcaggaacaggaacgcagcctgaccgttcggcgtagcgacagagggcagattggtaccggtattaatggcgaccgcctgcagctcgtattgcttcaacgtgatagcgccactttccattgccgctttcgcttcgttgatataaatcgtccccacgaagacgttatccgaaatggatgacagcagaccgttgaaaatatagaacagcgacagctgagcatgttcagatgcctgcaacacaaactgaataatcggcgaaaacagttgttggtcgataatcaccgcgactaccgagaaaaacaccgtcaacagtgcggtgaatggcagagattcggtgaaggctttaccgatagcatgttcatcggtgacaccggtcaatgatgtcgccagaataatgactgacaaaccaatcaagccaacttccgccagatgcaacgccagcgcagtcaccagccagacgccaataatcgcctggacaatcagacggattttatcctgacgggtacgctggtggcggctttgatcgtcaaactgttgcaacacttcgcggactttctccggcagcgtttcaccgtagccaaaccaacgcagcttctctaccagcaggcaggttaacaggccacaaatcagaaccggaacggtcaccggcgacatgcgcaggaagaaatcgccaaaatgccagccagccgctttagcgatgatcaggttctgtggttcgcccaccatggtcatcacgccgcctaatgcagtgccgacaccggcatgcatcatcaggctacgcagaaagccacggaactgttccagaaccactttgtaatgcttgtcgatatgactatcgtcttgcaggtcggtatcttcggtacgggaagaggctacgcggtgataaataccataaaaaccgacagcaacgctgatcaccaccgccacgacggttaaggcatcgaggaacgcggagaggaacgctgccgccacgcaaaaagagagcgacagcagcattttggagcgaatgcttaacagcaaacgggtaaatatgaacagcaacagctgtttcataaaatagatacccgccaccataaacatcaataacagcaagacttcaagatttgccgccacctcttcacggacgtgttccgcgctggtcatgccgatgaataccgcttcgatagccaacagaccaccggggagcagcgggtagcatttcagggccatcgccagagtgaaaataaattccgctaccagcaaccagcccgcgacgaaagggctgatgaggaaaattaacgggtttacgattaagaaaatgatgagggcgagtttgtaccagtcgggggactggcccaaaaaattgcgccatagcgcgcggccccaggagatctccatgatggtttcccttaccttacaaataatcaatgatgtttttatgtttaaacgcaaagcttaacggtcaggcaggagtgaggcaagtcttgatagtcaaggggaaagagatgcggaaaatgaagccttgatcccttttttcttctttttgtctgctatcagcgtagttagccctctggtatgatgagtccaactttgttttgctgtgttatggaaatctcactatggtcattaaggcgcaaagcccggcgggtttcgcggaagagtacattattgaaagtatctggaataaccgcttccctcccgggactattttgcccgcagaacgtgaactttcagaattaattggcgtaacgcgtactacgttacgtgaagtgttacagcgtctggcacgagatggctggttgaccattcaacatggcaagccgacgaaggtgaataatttctgggaaacctctggtttaaatatccttgaaacactggcgcgactggatcacgaaagtgtgccgcagcttattgataatttgctgtcggtgcgtaccaatatttcaactatttttattcgcaccgcgtttcgtcagcatcccgataaagcgcaggaagtgctggctaccgctaatgaagtggccgatcacgccgacgcctttgccgagctggattacaacatattccgcggcctggcgtttgcttccggcaacccgatttacggtctgattcttaacgggatgaaagggctgtatacgcgtattggtcgtcactatttcgccaatccggaagcgcgcagtctggcgctgggcttctaccacaaactgtcggcgttgtgcagtgaaggcgcgcacgatcaggtgtacgaaacagtgcgtcgctatgggcatgagagtggcgagatttggcaccggatgcagaaaaatctgccgggtgatttagccattcaggggcgataatcccttccgtttaaagagcaaacccctcaaacgaggggttttttgttgtttttacagatttcccattcttggcgggcaacgttccagcaactcgatgctgccgtcttcgttttgctgttcgagcatcacatcaaatccccacaggcgatgcacatgcttcagcacttctttgcgcccccgatccagcggtgcgcgattatgtggaatgtaacgcagcgtcagcgaacggtcgccgcgcaaatccacgttccagatctgaatattcggctccagattacttaagttatattgcgacgataaccggttacggatctcccgataaccttcttcattatgaatagcggaaatctccagataattatgccgatcatcatccagcacggtgaagaagcggaaatcacgcatcactttcggtgacagaaactggctgataaaactctcatctttgaaatcacgcatcgcgaaatgcagcgtttccagccagtcggaaccggcgatatccgggaaccagtatttgtcttcttccgttggcgactgacaaatccgtttaatatcctggaacatggcgaacccgagggcatacgggttgatgccgctgtaccacgggctgttataggggggctggaagaccacattggtgtggctgtgcaaaaactccagcataaaacgttccgttactttcccttcatcatacagatggttaaggatggtatagtgccagaaggtcgcccagccttcgttcatcacctgagtctgtttttgcggataaaaatactggctcaccttacgcacaatacgcaggatttcacgctgccatgattccagcagtggcgcatttttctccataaaatagagcaggttttcttgtggttcggacggatagcggcgcgcttcagcaaccgttttctcttcctcgcgcttcggcagggtacgccagagcatattgacctgactttgtagatactcttcgcgacttttctgccgggctttctcttcttgcagcgagattttttgcgggcgtttgtaccggtccacgccgtagttcatcagcgcgtggcacgagtccagaagccgttctacttcatcaacgccataacgttcttcgcactcggtaatatatttacgggcaaaaatcagataatcgacaatcgaactggcgtcggtccaactgcggaataagtaattgtttttaaagaaagagttatgcccatagcaggcgtgtgccatcaccagcgcctgcatggtaatggtgttctcttccatcaggtaagcgatacacgggttagagttaatgacgatttcataggccagtccttgctgaccgtgcttatacagccgttcagtctcgataaactttttaccgaatgaccagtgcggatagttaattggcatgccgacgctggagtaggcatccatcatctgttctgaggttatcacttcaatctggtgcgggtaggtatccagccggtagagtttcgccacccggtctatctctgccagataaacatccagcaggtcgaacgtccagtcgggtccatcgctcaaacgtgtggtgtccttattcatagaatcgatcgtcgccatacgcgcacctcattgttgtcggcgctctctgtgtggagcacctcatttcaagcatagaacacctgttaaaaaccgcgtcgccggagaatttttttctttgcgatttcttattatcagagtgccactaatccgcttctgaacggaattttatgctggataaaaagggcgttcagcaggagatactaaagacgccatattgccgcagagtcagggagatgtgagccagctcaccataaaaaagccgtatgttgaataatattttcaactgagttatcaagatgtaattagattattattcttttactgtatctaccgttatcggagtggctatgcgagttgtcatactgggaagtggtgtggtaggcgttgccagcgcctggtacttaaatcaggcaggacatgaggtcaccgtcattgatcgggagccgggggccgccctggaaaccagtgccgcgaatgccgggcaaatctcccccggatatgctgcaccgtgggcggcaccaggtgtgcctttaaaagcgattaaatggatgttccagcgccatgcgccgctggcggttcgtctcgacggtacgcagttccagttgaaatggatgtggcaaatgttacgtaactgcgacaccagccactacatggaaaacaaagggcggatggtgcgtctggcggaatacagccgtgattgcctgaaagcattgcgcgccgaaaccaatattcagtatgaagggcgtcagggtgggacgctgcaactgttccgtaccgaacaacagtatgaaaatgcgacccgcgatatcgccgtgctggaagatgccggcgtaccgtatcagctgctggaatccagccgcctggcggaagtggagcccgcgctggcagaagtggcgcacaaactgacgggcggcctgcagttacccaatgatgaaaccggagactgtcagctatttacccagaatctggcgcggatggcggagcaggcgggggttaaattccgctttaatacgcccgttgaccaactgctttgcgacggcgagcaaatctacggcgtgaagtgtggcgatgaagtgattaaggccgatgcgtatgtgatggcgtttggttcttactcgacggcgatgctcaaaggcattgttgatattccggtgtatccgctgaaaggctactcgctgactattccaattgcgcaggaagatggtgcgccagtatccactattcttgatgaaacctacaaaatcgccattacccgtttcgataaccgcattcgtgttggcggaatggcggaaattgttggttttaacaccgagctgttgcaaccgcgtcgtgaaacgctggaaatggtggttcgcgatctctatccacgcggcggtcatgtcgagcaggcgactttctggacgggtttgcgcccgatgacgccagacggtacgccggttgtcgggcgtacacgctttaaaaatctgtggctgaataccggtcacggcacgctcggctggacgatggcttgcggttccggtcagttgttaagcgatctgctctctggtcgcacgccagcgatcccatatgaggatctaagcgtagcgcgctacagccgtggatttacgccatcacgtccgggccatttacatggcgcacacagctaaggaaacgagatgacccgtccgatacaggccagcctcgatctgcaggcattaaaacagaatctgtccattgtccgccaggccgcgccgcacgcgcgcgtctggtcggtggtaaaagcgaacgcttacgggcatggtattgagcgtatctggagcgcgctcggggccaccgatggctttgcattacttaacctggaagaggcaataacgttacgtgagcgcggctggaaggggccgatcctgatgctggaaggatttttccatgctcaggatctggagatttatgaccagcaccgcctgaccacctgcgtacacagcaactggcagctcaaagcactgcaaaatgcgcggctaaaagcaccgttggatatttatcttaaagtgaacagtgggatgaatcggttgggcttccagcccgatcgcgtgcttaccgtctggcagcagttgcgggcaatggcgaatgttggcgagatgaccctgatgtcgcattttgccgaagcggaacatcctgatggaatttccagcgcgatggcgcgtattgagcaggcggcggaagggctggagtgtcggcgttcgttgtccaattcggcggcgactctgtggcacccggaagcgcattttgactgggttcggcctggcattattttgtatggcgcttcgccgtccggtcagtggcgtgatatcgccaataccggattacgtccggtgatgacgctaagcagtgagattattggtgtccagacgctaaaagcgggtgagcgtgtgggctacggcggtcgctatactgcgcgcgatgaacagcgaatcggcattgtcgccgcagggtacgccgacggttatccgcgccacgcgcctaccggtacccctgttttagtggacggcgtgcgcaccatgacggtggggaccgtctcgatggatatgctggcggtcgatttaacgccttgcccgcaggcggggattggtacgccggttgagctgtggggcaaggagatcaaaattgatgatgtcgccgccgctgccggaacggtgggctatgagttgatgtgcgcgctggcgttacgcgtcccggttgtgacagtgtaacttgttgtaagccggatcggagacagcgtcttctggttgcgaaaaaatcatccatccggctggtcagcaactgtagttgttaatgtgacagagccattgcccatgatagtgtccattaaaagaatggacactatttccccggaacctgaactcaccgcacaggcgttctacataaaacgcttacgcttcattgttgactcgaactcgacttcagataaatcacgctttacccttgatggagcctgtacatagatttgtgtaattgcctgattttgatatgttcaattcaacatcaaatgaaggttaaattatggacgacaaacaattgcaggctcaggctgcgttcagcaaagcatcgcaaccggcgatagatgcttcattaaatttaagattcagcttcctcttcagccacccgtacgccaatcttcaacacttcattatcttctttctcggccaccgtccagatcatcccggcaaactctacctggtcaccgacaaccggtgccgcgcctaacaactgctggacaatttcacccagcgtttgctgcttatcacgatattctcgcccgtcttccaggccatatatcagcgcaacatcagcatatttggcgctggcttcgagaatgaagtcaccaaagaagcgttgatccagcgcgaccggcggcgactggctgaacagtttaccgagcgccggaagatcgcgttcccgaccaattacacacaacacatcgccttcgcgcagtcgggtgctgccggtaggatgaagcaactggttatcacgaaacagtgccgcaatacgcgtctcttttggcatatgcaaatcgcgcagtgccgcgcccacgcaccatttatcggcactcaattgataaacaaactgctcccacggattttccggatgaatatccaggccaacgcgtgacaccggacgtcccactggcggaaccaccactttggcttttttagccgcccacgagagtgatgttccctgcaagagcagtgaaaccagaaccacaaagaaggcgacattaaagaacagacgtgcattctccagccccgccatcatcgggaacacggccaggatgattggcaccgcgccgcgtaatcctacccagctgataaacacgcgctcacgcagattgaaaccgcggaaggggagcaatccagcaaataccgaaaggggacgggcgaagaatatcatccatgccgacaaaatgagcgccggaatggcaataggcagcagatcgcttgggttaaccaatagccccagcaccaggaacatggcgatttgcgccagccaggcgaggccgtcgaaattttgcaggatgccgtagcggttgcgaatcggccgattacccagcagaaaaccgcacagataaacagccagaataccgctgccttccagcgccgtggttaaagcaaaaattaaaataccgccgcttaatgccagcaatggatataatccggcaggcagggcgatgcgattaatcatttgcagcagtaaataaccaccgccaagtccgatgacaatcccgaggccaaattgctgcagaatatcgaccacgaacatccaactgacactgctttcatgttgctggatcatcgcaatcagggtaatcgtcagaaagaccgccattggatcattactgccggattcaatttccagcgtcgagccaacacgttcgttaagccccttaccacccagcagagaaaagaccgctgcagcatcggtagagccgacgatagcgccgattaataagccttcaatcaaatcaagattaaacagccacgccgccatcatgccggttaaaccagaggtgataagcacgcccagcgtcgccagcgacagtgccggtcctaacgccacacgaaaggaactggcctgagtgcgcatcccgccgtcgagcaaaataatcgccagtgccaggttacttaccatgtaggcgaaggggtaattatcaaacgggataccgccgacgccatcgactcctgccagcatgccgatcgccagaaaaataaccagaataggaatgccaagacgggaagaaaatgaactaagtaatatactgctggtgacaaggatggatcctaagatgaaaaggctaattattgttgtggcatccaacggtcggttactcctgattacgctgtctcttatataaaccctaccatattagcggcagagacagcgttttacttagccctgaagcgtgatttttttacattttaagaacaggatgaccgctaatcgtcaactgagtgccttcccgggtgttattcagaatggcatgtgcgcccaacggcagcgtaaccgtgcgttgttcatgaccaaaatcgaggccggtaatgagtggaatcgacaggcgggaacgcaaaaacgcgtacactgactccaggttgtaacctgcgtcataatcattgggcgtgctgccgctaaagctaccgagaataatcgccttctgacgtggcaaaattcccgcatgatagagctgcaacagcatacgttcgacgcggaaagggtgctcgttaatatcttccagcaccagaataccgttctcaatttttggcatccacggtgtaccaatcagtgaaatcagcatcgcaagattgcctccccacaacgtgccttcggtctgacatgtcgggccttccccttgccattcaatggtgaaggtttcattgcgtaacgccagccagaaatggtgctcggtaaaggcgttcagttcatccgcgccaaagtttgctaccagcatggggccgctaaaggtgatgacattgccttgcgccagaagaccgcactgaatggcggtaaaatcgctatgcccgcatatgagcaacgggtcatattgttggcgagcaaccagtgcctgccagtcaatatctgccagtaaacgactggcaccgtaaccgccgcgtacagccagcacgatggtgttgggggtggtcagtctggcaagggaattgagatcttccaggcgctccgtttccgtacccgcaaaacgctcacaacgacgggcaataacctcgacgttattgacctgatgcccctcgtcggtaaggcgctggataccacgcagcgcggcgtgctgtttaatgcagtaacccgatggggcaattaagtgaaacagagacatggcaattccttgctgacaacagaaacgaaatgtatatcatgccgcttaggtgtgccgttgtcacctcaacggcgattccaggctataaggatagaagaagtgaaattgagatggtttgcctttttgattgtgttattagcgggttgttcatcaaagcatgactatacgaacccgccgtggaacgcgaaagttccggtgcaacgtgcgatgcagtggatgccaataagccagaaagccggtgcagcctggggcgtcgatccacaattgatcacggcgattatcgctatcgaatcgggtggtaatccgaatgcggtgagtaaatcgaatgccattggtttgatgcagttaaaagcttcaacctccggacgtgatgtttatcgccgtatgggctggagtggtgagccgacgaccagcgagctgaaaaatccagagcgtaatatttcaatgggggcggcttacctgaatattctggaaaccggcccgctggcaggcattgaagatccgaaggtactgcaatatgcgctggtggtgtcatacgctaacggggcaggtgcgctgctacggactttctcgtcagatcggaaaaaggcgatcagcaaaatcaacgatttggatgctgacgagttcctcgatcacgtagcgcgaaatcaccctgcgccgcaggctccgcgctatatctacaaacttgagcaggcactggacgcgatgtaaatcagtcgcgcactttgtccgctttttcccgggcttctcgctcgagagagaaaataatccgctgtaattgccgctccaccgtcgggctgacgttaagaaaacggaagctcagacggggagtggtgatggtttcattcttgccatcaatcactttgcgctcgctgatggagattaactgggcgtcaaagtgaaaaacaccccattgcctcatgttgacttcaatctgagcgaagcgcatgccttcttgtaattcggcaggctttgctgtttccagtaatgcgcccatgccgcctaacgacaaatcatacaggtggaaacgtaacgtactgttatccgccagtttggtctggcaaaaataaggcggatggagtggggcggagatgcggaaatatcggcgtcgttgtacaaaccataaggtgggaggcggtacggtgataaatgccggaagctgcaagtattcactctgctgtagttgttcaacagtaaactcgactttcgcaccctgagtttcggcggtaatggtaatgtgctgtgcctttagcacggcgatgttgtcttcggcttgactgccgaaatccagcaccagtttatccggggttattgccagtattttgctgatcagctgcccgccattccaactgagacgcaaaggaattgcggctttgtgcaaatcgcgtaacacgcccaggacggctaacggattttgtttcaggaactgctcatggtaatgactcacgcggaaaaactcctgactgacaaactgtctttggtttatcggtcacagttaacaaaacttaatacaaatgcgtgaatattttttacatgttgttcttaaatcagccgacatacgcccagcatcgatcccgcccttgcctatacttagagcgttgatgtaagcatttcttgcgtccgattcatcgaaacgagggcctgaacatgggaattattgcctggattatttttggcctgatagccggcattatcgccaagctaatcatgccgaggcgtgatggtggtggatttttcctgacctgtattctcgggatagtcggtgcggtggtcggcggctggctggcgaccatgtttggcattggcggctccatcagtggttttaatctgcacagcttcctggtggcggtggtgggagctattctcgttctgggcatattccgcctcctgcgaagagaataagattttcataaggcggatagcgatacagatgccgctatccgctttcacatcagaacgtatactcgacacctgctttacgggtgaaaaaaatcaatatagcacttcgatatccgataaagtcggttcccggtaacaacaacagaatccttttttaattattgtttcgttgtttttggtgtgattcagaaaataaatattttagacagtagccagtcaggcgttaaaaatggggcggatagtgaggcggttttggctgcgcttattgaacatttagaattgatcaatccttctggcagattaagccaaaatacccgttcggcaatgcttcagttacgcgaagaggaatggtctgaattctttttttggttgctaaattctctggagtgtctggattatgtgattattaatttaactccagaaagcaaaaaaacgttgatgagtgaacaccgtaacaatattcaggtagcaattgatgctttatatagccaacgtcggcgtaaatcgccgggtgatgaaagtgaaacacttacccgtagaaatgacgctatcttcggcaaccacgtatggcaaacatttgcgcaatacttcccgccaggacttgaaaaaccgtctgtgtagaaaaaaccatagctatggtgttatctgccgacaacgccatccggagaagccgaatgacgttgtcggagtaagcgctggttaaggtgtgggttgtgcctctttggttgagggttgcgtcgttgctgacttaacggtcggacgcgtcgccggaacattgtcacacggttgctctttcgggcagatcaaatccagcattttcagcgtcacgccattggtccagccaaagccatcctgtaatggatattcgccaccgccgccccccgttccggtggtgctgacatcatatttttccaccagctttttctcccggtcataggtgtgctgaacattggtcaggaagtgccagctaatgtccatcgccacctctttttgcccgtagttttgtaatccttctgtcgcgacccactgtaacggtgcccagccatttggcgcatcccattgttgcccacttttcaccgacgtggtgttcaggccgccgggttgcagcagatgtgttttcgtcgccgtcgccattttgttggcgcgatctttcgctgccgcattgacgtacagcgggaacagggcggccgcggttaactgattgcgcactttatgacttttcaggtcgtaatcggcataccagccttgttgatcgttccacaggtatttttcgatccctttttgacgggcatttgccagcgtttcgtactggtttgccatcgcgttatctccggcagctttgctggcgcgggcgaggattttttccattttaaacatcaggctgttcagatcgaccggtacgatgctggtggtgcgtaaggtatttaactgctgcgggttgtccatccagcgcgagctgaaatcccagccagacgcagcggcagagcgcaggtcgcggtaaatttcagtggcaggtcgattcggattgcttttggcggtggcaatatcttccacccatgactctggtcgtggcgtatcgcgatcgtcccagtagcggttgagaagggtaccatcctgaagtttgacaacgcgtttttcctgttgtccggcttgcaggttttcaacaccgtccatccagtaagcatattctttttgcatttgcggcaggtattgcttcaacgcggcatcgccttcatgctgcgccagtaactctaccatcagggcaaagaagggcggttgcgagcggcttaaatagtaactgcggttgccgttgggaatatgaccgtaagtgtctatttcatgagcaaaattggccaccatatccgcgactttatcccagtgaccgctttcggcaagtcctaacatggtgaagtaactgtcccagtaatatacctcgcgaaaacgtccgcccggcacgacataaggttccggcagcggtaacagagaatcccatttttcggtgttttcggtagaacgcgttaataccggccaaagtccgtcaatatgttcgcgcagtgactgcccctctggcggaacatatttctcgccttctttcggcagggtgaaattgacgttaacgaaatggcgcagatcaaatccgctctggttttgctgcatccgataatcagcaaggatcatcagcggatcgctgttcggcacggcatcggcaaaggttttttggtccggaaaaagtttggcgttttgcacatcattaaacagcggccctaataaaatatcaggcggctgtggtgttaccggtgtttcttctgcctgcaccgatagcgcagcgaaacacaaaaagatacaggctggaattaacgccattttttgcgggcgagaaggtgcgggggatttcatcaatcattctcctttggcgaaaccgaataaaacggtattcaagtatcagaaaaccttagttcaggatcgcactagctgcatgatcgaaatctcattctgcgaactgtcaggcattttagaaaagggaattaaagggataaataacggcgaaatagagtgatcaaataacgtctgtttattagccagccagcgacatttggttcgcgattagcgaagaaaaatcatcataaattggtaaaaaatataacaggtagttaaaaaacatcagtgctgggtaaattgccggatgacatcagaacgatgccatccgaacggtggcttaaccctgacggttgaaacgttgcgttttaacgtccagcgttagcgtttcttctggttgtatcgcatacagtttctcaccctgctggcaaatccagccaatccccagttcacgggcgattagggcgctgtgggataccggacttccggcgctaaggcagataccttttacaaccgccggatccagttgcagtactgtggaaggataaatgttctccgccagtagaatagttggcgagttaaactgcgggagttcttctttcgtttgggtcaggtggaccagggtgcgatgcagaagatcgtccacatcaatatagcgagcttgtagatattcatcatccagttgctggtattgctggctaagttctttaagaacttgctgccaggcatattctgccgtgcaatgttcatgctgaaggagttcgcttgccgccgccagcagttccggatcatctaacagtgtatggtgaccagaaaagattgcggcaatatcgtcaagcccgctggcttctgcttttgctgttaacgtcatcagatctaataacgtgaagtcaatagcctggcgtaatcgatcttgttcttcttccacggtcagggttgattttgcctgtaccgtacataaaactggttgataataaaaggctttacccgaaacaggcggaacgggacgcagagtaggtggagcgacttcctccgtttcaccaaagttatcttcagccagctgacggaaagcgatcagtgcctcttcagcttctggccctttcgcaatcaggcgcagcgtatcgttatagcgaacttgtagtaacgcaatctggttaatactctctggtgtgacgcatttgccgtttttttccagcaacatatcggcattaaatgtcgataaggtataaaccagccgggaggccggacgtacatgcaggccgttacggttttttatgaccaccgccagagaacgggcttcttcatcgtacgcaggacatgtgtcagagattttagtgtcggaggacggtaaacccagttgttcacgtttggcttccagcgcatgcatagcgtcaaagataactttgtcgatatccgctcccgaggccgcgctgaccgttgctgccagtgtaccttcgaccaacggcgcagcacacaaacgtacttttgcggcgatcttgggagccagcaattccagcgcagtttcagcactcaataatgcgctacccatatccatcatgaccagcacatggtcggcatcagcaacagattcgatggcctccatcactttgacggcatcggtaccaataggattttgtggatcgtcaattcccgcggcaatggcgattttacaactatcactcattaacatctgacgggctaattcaccgacaccttctcccagtcggctgctatgtgaaactatgaccaggtttaccatcaccaattccttactcttttgcggctaacgccaacatttgcatcataaacatcaccgaggtcgcgccgggatcctggtgaccaatactgcgttcaccgagataactggcgcggcctttgcgggcttgcatcgtaatcgtactttgtgcagcggattcggcgattctactggcagcttcgagcgccaccggaacagagagattttgctcgctggactgacgtaacgattccaccaccggcacccacacatcacacatggttttatcgccaggttcggctttcccgcgactgattacgccgtccacgccatcgcggaacatctgataaagctcttccagtgtcaggctttgccgtgcctgggtcgcctgtgcggcgcggataaagaaggtaccgaacagcggaccactggcaccaccgacgctggaaagcagcgtcataccggtattcttgagaatgaaaccgatatctttatctgcgatagcagggagtttttccaccactttgctaaagcctcggttcatatttagcccgtggtcagcgtcgccaatttcgcgatccagtccggtaagatactcgctctcggtgctgaaaatatcgccacaacgagtgagccagttaacaatttgagttctgctcagtgacattgctttctccttatttaccccagttaagggccggggtgtggaccggggcgtcccagagtgccagcgtttcgtcatcaactttcagtaaggtgattgagaaaccggtcatatccagtgaggtgcagtacgcgccaattaaattacgttcgatagtcaatcccgcttgctggcaacgtgtggtcaggcggttatagacgccgtacagctcagaaagcggagttgcgccaagattgttaaccagcgcaatcacccgatcgccagactggagcggttgtttggtttgttgttcttcctgccaactgccttgttgataatcccagaaacgcaaagtgcgatggtatgagccattttccagcagggtgtcgaacatttcatcgacggtttgatcaagggaagagaaggagcggcggtcaatacccggctcaccatgaatgccgacgccaaactccatctcattatccgccagggtaaaagaaggtttgcccgcggcaggaacggtacaggcaccgagagcgatacctattgagtggccttgattattcaacttacgccccagttccgcacaggcgtccagtgagtcgccacgctccgccgctgcgcctacgagtttttcaattaatacggtgttggcaacgccgcgtcgcccggcggtataaagactgtcttttaccgcaacgtcgtcatcaatgaccacagtggtcacttttacgccgctatcgtgcagtaactcggtcgctgtttcaaagttaagaatatcgccggtgtaatttttgataatcaacagtacaccttcgccgccatcaatttgcatggcgcattcaaagattttatcgggcgtcggtgaggtgaaaatttcgcccggacaggcccccgaaagcatcccctgaccgatataaccacagtgcatcggctcgtgtccgctgccgccacccgacagcagggcgacttttcctgcaacaggggcatcagctcgggtgacatacaccggatcctgatgcagtgtcagcgatggatgcgctttcgccagtcctgccagttgttcgtccagtacgtcttgcacatcattgatcaattttttcattattttgctccagcaattacggtagggcatggatgatgttcaacgacacggcgaccactgactgccgatgaatccattgtgcatcaggcaagggaaaagaaaattagcccaaattatgtttcatagtgaaacatatgctttaatgaatgttccatattgaaacttttacgtgtattaatacttaaaattgcgagccggaacaccttttgtcataagggatgcgggatatgagtggcgcttttaacaacgatggtcggggcatatctcccttaattgcaacctcctgggagcgatgcaataagctgatgaaacgggagacatggaacgtaccacatcaggcccagggcgtgacatttgcttctatttatcggcgtaagaaagcgatgctgacgctcgggcaggctgcgctggaagatgcctgggaatatatggcaccgcgagagtgtgcgctgcttatcctcgatgaaaccgcctgcattctcagccgtaatggcgatccgcaaaccttgcagcagctaagtgcactgggattcaatgacggcacgtattgcgccgagggaattattggtacttgtgcgctatcgttagcggctatctctggtcaggccgtgaaaacgatggccgatcaacatttcaaacaggcactctggaactgggccttttgtgcaacgccgttgtttgacagcaagggccgattgacgggaacaatagcgctggcgtgtccggttgagcaaactaccgcagctgatttgccgttgacgttggcaatcgcccgcgaggtcggtaatttactgctgacggacagtttgctcgctgaaactaaccgtcatttaaatcaacttaatgccctgttagaaagtatggatgatggcgtgattagctgggacgagcagggtaatttgcaatttattaatgcccaggcggcgcgggtcttgcgccttgacgcgacggcaagtcagggacgggcaatcactgaactcttaacgttacccgccgtattgcaacaagcaataaaacaggcacatccgctcaaacacgtagaagcaacctttgaaagccagcaccagtttattgatgcggtgataacccttaaaccgataatagaaacgcagggaaccagctttattttgttgctccatcctgtggaacagatgcggcagttgatgaccagtcaattaggaaaagtcagccatacctttgctcatatgccacaggacgatccgcaaacccgccgcttgattcattttggtcgccaggcggcgcgcagtagctttcctgtcctgctttgtggagaagagggcgtgggcaaggcactgctaagtcaggcaattcataatgaaagcgagcgtgctgcaggtccttatatcgccgtcaattgtgagttatatggtgatgctgcgctggcggaagaatttattggtggcgatcgcacggacaatgaaaatggccgtctgagtcggctggaactggcacacggcggcacgctgtttcttgaaaagattgaatatctggcggtggagttacagtctgctttgcttcaggttatcaagcagggggttatcacgcgactggatgcgcggcgtttaataccaattgatgtcaaagtgattgccacaacgaccgcggacctcgcaatgctggtggaacaaaatcgttttagtcgccagctgtattacgcgctgcatgcatttgaaattaccatcccgcctctgcgtatgcggcgtggcagcattccggcgctggtgaataacaaattacgcagtcttgaaaaacgcttctctacgcggctgaaaattgatgacgatgccctcgctcgcctggtttcttgtgcatggccaggcaacgattttgaactttacagcgtcatcgagaatcttgctctgagtagtgataacgggcgcattcgcgtcagtgatttacctgaacatctgtttaccgagcaggcgacagatgatgtcagcgccacccgcctttccaccagtctgtcatttgcggaagttgaaaaagaggcaattattaacgcagcccaggtcacaggcggtcgcattcaggaaatgtcggctttacttgggatcggccgcactacgctgtggcggaaaatgaagcaacatggcattgatgcagggcagtttaagcgccgggtatgaaagacagaaacgatttctgatacatcagagtgatctgtatttcattccggcgcacgctaacaattttcagcatcgtttaagggcttgtctatcccgcacttaaaagctgaagcgatatcctccgttgacttgcttctgatcaaagaggttaccctgcgtgtaatccgcttcgagatagaatgtgtgctgtttgttatactgtgcactgactcccacgccgttattccagccattacctttgaaactgtacttctcccgggagttgttcaacagatattcggtatcccctgaaaactcgcggatagcgccagtcttcacatagacattcagctggctgttgcctgcggtgatgtcataccccagtatcatgctggcacgccccagcagcgattcgtagtgattcagatgtatattgaggccattactcgccttcatagccatctcattctggtggctgtatgtaagctgggtttgcggctctatatagaacccataaccagtaggggacaggttgaacctctgcccggcttccagggagatgctcattccattcgcagtgccgttggcgttaacgccgttgttctgactgtccagtacgtggaaactatttttctggcgcgatgcttttataacgagatcgctgtaaaaaccgttttgtgccatgtaactggcgtacattcccatgtagtctgaacgtgcggtaccgtcgcctccgctatagtccggcgatgcatgtgttgagccaatatacagaccgacatacaacggcattacatcagagagacgtttatccccaccaaactggataccgctgtaacccatgtcaaagccgctcagtttgccactggcaaaggagtccaggcttcccccataactgcgcaaccagatattaccgtctttactctgatttcgcaggtcacccatccgttgcatcagcgtacggttttcaacatagttcaataagtaaccgacattgagataattgccgccagcatctgcggtcgtggtgggtttaggcgtgggagcgggttcaggcgtaggatcggggttgactatgggaggctgagcgggagctggtgtgggttcaggattaggagtcggttccggaactgtcccggaagcgtaaagctcccagttagtgccatttttacgcacatcgtacagatatccccccaactcaacctgagaagacgcgctgaacgaggccgcgccgtcagtggtttttaccactgtcagaacttcatttcccgttgtggcctcgctgccctggttgcggatagccaatacgtgattaccagcactactcccgctgatattcaataaatcccctttattattaacgccattaccctcgccaacaacatcagcacgcataataaaggtactgttaccgctcaggttctctacgtttaatgtggcaaatgtgccggcagttgacccgtggctggcaaaatcgacagttgaatggctcagcgccagcgtgtcgagattagaattacttgttacgttccagacgctgttattcattgcaacgtccagttttccgccattgacattatcgctgagggaggaacctgtccaaaccgacccagggtgcatatccagattgattagcccacctttggaaagaacgctaccgttgataagcatacgacccgaggcgttgatgcggctggcggcataaccatcgtcatgttgcgttgcaatggccatctggtcgggtgtactcatatcaatgaccagatcgctcgtgaggtcgatctggctgttggtcatggcataaattcccctggctcctgccgcgccggtgatagccaaactgtctccggttattctaccgccgctgagcgcccacaaacccagcgccagactgccattacgatcaactgtaatatcggtattttgcatgttgacaacagccgttgccgtctgggccgaggcaccataagaaccgccggaaaagatgctgtttcgttgcgccgccgtgccagaaaaattgattgtcgcgtctgaaccactggtgacgaggccaccgccctgcgcggaagaaatatggctatctgcaccgatagtggttgtaccaccacgaacttcgacgccattggccgcggctccagttacatcaacagtgagtgcattcgcgctaacctggccaaagctccagaggccgtgtgcattatcgccattggttttaatggaactgtttgttccgagatcgacaacagagtttttctgtacgtttatccccatggcgctgtagccctgaacatcgattgtcaggtctgtagccgtaaaacgcgcagcaccattggcgttattgccgttgagaccaccgatataaacacctgtacttccatcggtcgtgattttacttccgcttccaagatcgacactggtgccatagtcattgatggttaggcctataccgttcgagttttcaatggtgaattgagtggctgttagtgttgagctatgcccaataatgatgccgtcatcgttactcttaatggtgctgcctgtgcctaagtcagcatgggtatagtcaccaattaagttaatgccgatggcagaggtttgaccaacaacatctactgtgagtcggttagctgtcagggagctgttttgccctgaataatgattccttttgcatatccagaggcgtcgttgacattgacggtgacatcattacccaggttgatattgccaggcgtgtttcctgctggggtcattacaccatagaggtttcctgatggatcggcggtatctcctgtaattctgtcaccatcattaatagtaatattggtgccatattgacttcctgtatcagcagctatcagcaggggggaaaagataattgcattcaaaccaatagcgccaaattttatcagttgaattgagggcgaacggatttttaattcagcgagacgatctgctttggtattcccattgtgttgtttgatgcccataccactcctatatagtacccagactatgggtctatggattttgtcattttgtttaaatcaatgaataatatcctcttatcatcatgatatttgtatggtgcactcatgatgagcttctcagagaataattctctattaccgggcaaaatcaggaacacaggagttaatatatatttaacatcccccttacaaaggtgagtttatatcgagttattccctaagttgtcgttacttattccaattcgttactataaatatggcaaaaatattacaacaaacagcggttaaaaaatttggtgaagattttttgtaataatcctaattagttatgggaatttcgcttgatgtatctgcataacaaaaacaatatgcgccatttttgcattactaataagaaaaagcaaaaaacatcgatattcattttgggtcaatgggttttctggcctatcgttgttattgtgctactggttatcattttcatcttgccagcatattggagcgtgatcaattttgatcagctgtgaaggtggctgatgtgtagtgatacaaaaacttacgttatatcactgctaatgagatatccgtcatctgaacacttatgtctttaattattctcgtggttcactataggcaataagcacaaaagtgtaggatgttacaagaatgattaggactcggtgaaatgaaaaatccacgcaattgcgtggattttatatacttttgcgctcttcatgagatttagcgaaacctcatgagacaacaaattaattagacgttgaaaaggaagttcatcacatcgccatctttaacgatgtaatctttaccttctgcacgcattttgcctgcttctttcgcgccttgttcacctttgtaagtgatgaaatcttcaaacgagatggtttgtgcacggataaagcctttttcaaaatcagtatggattttgcccgctgcctgcggcgcggttgctccaaccggaatggtccatgcacgcacttctttcaccccagcggtgaagtaagtttgcaggttcagcagcttataaccggcacggatcacacggttcaggcccggctcttccagcccaagctcctgcataaactcgtcacgttcttcgtcgtccagttcggcaatgtctgcttcaacagcagcacaaaccggaaccacaacagaaccttctttcgccgcgatttcacgcacctggtcaagatatgggttgttttcaaaaccgtcttcgttgacgttggcgatgtacattgttggtttcagcgtcaggaagctcaggtaacgaatagccgctttctcttcagcgcttaaatccagcgcgcgcagcatacctgcattttccaactggggcaggcatttttccaggaccgccagctcagctttcgcgtctttatcgccacctttggctttcttctgtacgcgatgaatcgcacgttcgcaggtgtcgaggtctgccagcgccagttcggtgttgataacttcaatatcgtcagccgggttaactttgccggaaacgtgaatgatgttgtcattttcaaagcagcgaacaacgtgaccgatcgcttcggtttcacggatgttggtcaggaactggttacccagaccttcgcctttcgatgcgccttttaccagaccggcgatatcgacaaattccatggtcgtgggaagcgtacgttgcggttttacgatttcagccagttgatccaggcgagggtcaggcattggtacgacgcctgtgttcggctcaatggtgcagaatggaaagttggccgcttcaataccggctttggtcagcgcgttgaacagggtagatttcccgacgttgggcaaaccgacgataccgcatttgaatcccatgatttaaatcaccttaatatcttaataatcaacctgttattgctaacagattgcagaaatggaaataactttgcctattatacacggcactcggcaaaaatgccgcagacaacgacttattgcgctttaaaggcgtgcaatcggttcgttgctttggtcaagccatctgtaaaccacatttcagtacaacgcgccgcttcgtcgatggcttcatcaattaacttctgttcactaacaggcggtttgcctaacacaaaaccgacaactttatttttatcgcccggatgaccgattccgatgcgtaaacggtgaaagttagggttattacccaatttactgatgatgtctttcagtccattgtgaccaccatggccaccgcccaatttaaatttggcgacgccaggaggcagatccagttcgtcgtgggccaccagaatttcgtccggattaatgcggaaaaaactggccatcgccgcaacggctttgccgctgagattcataaatgtagtcgggactaacaggcggacatcttcgcctccaagagtgactcgcgaagtataaccaaagaatttagcctcttcgcgcagcggagcgcgcaaacgctctgccagtaagtcaacgaaccaggcaccagcattatgtcgcgttgcggcgtattcagcaccggggttcgccaggccgacaatcaatttaatcgtcacgtttttttgtcctgagtgtgtacataactggcgcgtagtttactggttgcggccccgcttgacaaaaaactgcgaatcaaatgcagataacgtaataattgcatgagtggactattagaaagtcaaggtgttcaggcgtttatttgtaaagttttgttgaaataagggttgtaattgtgatcacgcccgcacataacccacagggtgttgtctatactttacacataaggaagaggggtattccctgttacaacccagaaagttccggaggtgacatatgaaacgcaaaaacgcttcgttactcggtaacgtgctcatggggttgggtctggtggtaatggtggtcggcgtggggtattcaatcctcaaccagttaccacagtttaatatgccccagtatttcgcacatggtgcagtgctaagtattttcgtcggtgccattctctggctggcgggtgcccgtgttggcgggcatgaacaggtgtgcgaccgttactggtgggttcgccactatgacaaacgttgccgccgtagcgataatcgccgtcatagctaacaaataatgcagtttgctgaccagtcagtttgcgctgactggtcaatctcgtacttataaatccgccatcgccgcgcgacgattcgggaagaacgccaggcgtcccgggatcggttgaatgccagcgcgagccatagtgcgcagtggctggaattccacgttgcacacgcgcagttcacatccctcgggcagacgcttcacaaaacgctggaacgcatcaagaccaccagcatcaagtaccggaaccgcatcccacttcagaatcacaatccgtttgccttcaagacgtgactccaggtccgtgaacaagccttcagcagcagcaaaaaacagcgggccaataacgcgcagaaccaggacatcgtctggaacatctacgactaccggtgccaggcgagtcatacgtgcgatacgacgcataaacagcagcgatgccagcacgatccccacgctgatggcaataaccatatcaaacagcacggtcagcgacatgcacagcagcatgacaatgatgtcatctttcggcgcatgacgcagcaagtcgaccactttgtgcgcttcactcatgttccacgccaccatcaacagcagggcagccatggcggaaagcggcagccaggagagcagcggtgccagtaccagcagggcaagaataaccagaatagagtggatcaccgccgagataggggaagttgccccggcacggacgttagcggcagaacgcgcgatggcagctgtagcggtaatgccaccaaagaacggagcgatgatattccccagtccctgtccaaccagttcgctattcgccttgtgtttcgtcccggtcataccatccagcaccacggcgcagagcagagattcgattgcgccgagcattgccattgagaatgccgcaggcagcagtgtgcgaatagaatcccaggttagcgtgaattctgaattaggcagatcccacggcagcaccagttgcggcagcagttgcggaataccgttaccctgagaaccatcggccaggacgtagtggaattgcgaaccgatggtagcaacatgtccgccgagcaggttaacaatccccatcaccgcgcaaccagccagcaaggccggaaggtgaccgggtaaacgaatgcccagacgcggccagaaaacaagaatacctagcgtcacaatgccaatggcagcatcacccacattaatggtcggcagcgccataaataatgcgccgactttttgtagataatgttccgggacatgggccatttgcagaccgagaaaatctttaatctgcatggtaccgatggtgatcccgatacccgaggtgaaacctaaggtgacggaaaccggaatatactcaatcaggcgaccaaagcgtgccagacccatcagaatcaaaaaaatccccgacagcaaggtcgcaaccagcagtcctgccagtccaaactgttgcgacacgggatagagaattaccacaaatgccgcagtcggaccggaaacgctaaagcgtgacccacccgtcagagcaatgacaatccccgcaacagctgcggtatataaaccgtactggggtgccacaccactaccaatagccaacgccatcgccagcgggatagcaataatcccgacggttatcccggcaatcaagtcacgggtaaaccgtgcggcagtatatttttctttccagcaagcgtcgatcagagcgcggaaaggcatcacatgtgaggaaaatattttgttcacaataatgtttcatccgtgagcgcatcatctgtcaactaaatggcaggtgaaggaggcataggtcatacaaatggatattacagacaaaaaaacccgccgcagcgggtctttgagccgggttcgattagtgttcgaacatggcagagatcgattcttcgttgctgatacgacgaatcgcttcggccagcatacctgacagggtcagagtacgcacgttcggcagtgatttgatttcatcgctcagcggaatggtatcgcagacaacgacttcatcaattacagagttacgcaggttattcgccgcgttgccagagaagatcgggtgagtcgcgtacgcaaatacacgtttagcaccacgttctttcagagcttcagcagctttacacagcgtaccgccagtgtcgatcatatcatcgaccagtacgcagtcacgacctgcaacgtcaccgatgatatgcatcacctgggaaacgttcgcacgcggacgacgtttgtcgatgattgccatatcggtatcgttcagcagcttagcgatagcgcgggcacgcacaacgccgccgatgtccggagaaaccacaattgggttatccagattcagctgcagcatgtcttccagcaggatcgggctaccaaatacgttatcaaccggaacgtcgaagaaaccctgaatctgttcagcgtgcagatccactgtcagcacacggtcaacaccgacgctggagaggaagtctgcaaccactttcgcagtgattggtacacgagcggaacggacgcgacggtcctggcgcgcatagccaaagtaggggataacagcggtgatacgacctgcggaagcacgacgcagggcatcaaccataacgactaattccatcaggttgtcgttagtaggggcacaagtggactggatgatgaaaatatcaccaccgcgtacattttcgttgatttgtacactgacttcgccgtcgctaaagcgacctacagcggcgtcgccgagtgaagtgtacaggcggttggcaatacgttgtgctagttccggggtggcgttaccagcaaaaagcttcatatcaggcacgagaagaacctcaggcatgcgtccattggtggaaagaatctgccgaaaactgtgcgggccaggcatgatcctttccaggcggtgtattaaagagcgcgatgcaacgtctggaacaaggtgacgttgtcaccgaaactcagcttgcccggcttaaagcatggctctgtgcaatggggaaagattaacgcctttcgccacaaagccattgagccattccggggcttgctctagcacctggcgggcttcagactctgtatcaaattcagcaaagacacaggcccctgtcccagtcaggcgcgacggggcgtattctaacagccaggaaagcaccgcatcaacctcgcgaaaacgttttcttgcgataacctcgcaatcattgctgaattcacattttagcaacgtttctattgacctttttggcgtattgcgcgggagttcaggatctttaaaaatcaccggagtcggaatacttacaccagggtgcgccaccagataccacttctctggcggatccaccggcgttagtatttcaccaacgccttcggcaaacgcggcatgcccccgaacaaagacaggaacatctgcgcccagcgtcagccccatttccgccagctcatccatgcttagcccgcattgccagagataatttaatgccaccaggaccgtcgcggcattggatgaaccaccgccgagaccgccgcccatcggcaaacgcttgtcaatgctgatattcgcaccgcttcccgtcggaagacgcccgctgtctgccgcagtttttatcaacaatcgcgctgcgcgaacgatcaggttatcttcatgttccacgccttcaacgggcgttaacagacgaatatccccatcgtcacgaagctcaatgctgatggtgtcgccgtaatcaagaaactgaaacagcgtttgcagcgtgtggtaaccatccgcacgctgaccggtaatgtataaaaacagattaagttttgccggagagggccactgtgtccgcattatttcactatccagttatccatttttaacttgatgcgttgaccaccgtcggtgagttccatattggctggcatcgcaggttgcgttttggtgtcataaccaccataaacaaccttccagtttttgccattctggctgtaggtaatttcgctcaggcggtactggtcgtccagtttgtagtcggttgcatcacccggtaaacctaaaatccactggcgcaagctgttgagcggaattggcattccggtcaatttgccaatcatctcttcggcgtcatcggcggtataacgctgacctttattgtcgactaactgcacgttacccggttgagcattcagctccagttccgtgctgcccaatgggttagtgagcagcagacggtagcgatcctggccggtttgctgccagaaaaagcgggcgtacactttttgttggtcagaaatataagcgaacgcgccgcgagtctgatactgattaagattgcgcacgtcttgctgatgctgacgccattgtggcgaatccgggcttttgccaggacctttgggcgtggtaacggaacaggcagtgagcacaagagcagccagcggtagcaggcggataagacgaaaatcgggcaggggcatagtgatgacaagtccttgagatacgttgcagttataacccttaatgctagcgttaccgtccgctatcgtctatgttcaagttgtcttaattgccagaatctaacggctttcggcaattactccaaaagggggcgctctcttttattgatcttacgcatcctgtatgatgcaagcagactaaccctatcaacgttggtattatttcccgcagacatgacccttttagcactcggtatcaaccataaaacggcacctgtatcgctgcgagaacgtgtatcgttttcgccggataagctcgatcaggcgcttgacagcctgcttgcgcagccgatggtgcagggcggcgtggtgctgtcgacgtgcaaccgcacggaactttatcttagcgttgaagagcaggataacctgcaagaggcgttaatccgctggctttgcgattatcacaatcttaatgaagaagatctgcgtaaaagcctctactggcatcaggataacgacgcggttagccatttaatgcgtgttgccagcggcctggattcactggttcttggggagccgcagatcctcggtcaggttaaaaaagcgtttgccgattcgcaaaaaggtcatatgaaggccagcgaactggaacgcatgttccagaaatctttctctgtcgcgaaacgcgttcgcactgaaacagatatcggtgccagtgctgtgtctgtcgcttttgcggcttgtacgctggcgcggcagatctttgaatcgctctctacggtcacagtgttgctggtaggcgcgggcgaaaccatcgagctggtagcgcgtcatctgcgcgaacataaagtacagaagatgattatcgccaaccgcactcgcgaacgtgcccaaattctggcagatgaagttggcgcggaagtgattgccctgagtgagatcgacgaacgtctgcgcgaagccgatatcatcatcagttccaccgccagcccgttaccgattatcgggaaaggcatggtggagcgcgcattaaaaagccgtcgcaaccaaccaatgctgttggtggatattgccgttccgcgcgatgttgagccggaagttggcaaactggcgaatgcttatctttatagtgtggacgatctgcaaagcatcatttcgcacaacctggcgcagcgtaaagccgcagcggttgaggcggaaactattgtcgctcaggaaaccagcgaatttatggcgtggctgcgagcacaaagcgccagcgaaaccattcgcgagtatcgcagccaggcagagcacgttcgcgatgagttaaccgccaaagcgttagcggcccttgagcagggcggcgacgcgcaagccattatgcaggatctggcatggaaactgactaaccgcttgatccatgcgccaacgaaatcacttcaacaggccgcccgtgacggggataacgaacgcctgaatattctgcgcgacagcctcgggctggagtagcagtacatcattttctttttttacagggtgcatttacgcctatgaagccttctatcgttgccaaactggaagccctgcatgaacgccatgaagaagttcaggcgttgctgggtgacgcgcaaactatcgccgaccaggaacgttttcgcgcattatcacgcgaatatgcgcagttaagtgatgtttcgcgctgttttaccgactggcaacaggttcaggaagatatcgaaaccgcacagatgatgctcgatgatcctgaaatgcgtgagatggcgcaggatgaactgcgcgaagctaaagaaaaaagcgagcaactggaacagcaattacaggttctgttactgccaaaagatcctgatgacgaacgtaacgccttcctcgaagtccgagccggaaccggcggcgacgaagcggcgctgttcgcaggcgatctgttccgtatgtacagccgttacgccgaagcccgccgctggcgggtagaaatcatgagcgccagcgagggtgaacatggtggttataaagagatcatcgccaaaattagcggtgatggtgtgtatggtcgtctgaaatttgaatctggcggtcatcgcgtgcagcgtgttcctgctacggaatcgcagggtcgtattcatacttctgcttgtaccgttgcggtaatgccagaactgcctgacgcagaactgccggacatcaacccagcagatttacgcattgatactttccgctcgtcaggggcgggtggtcagcacgttaacaccaccgattcggcaattcgtattactcacttgccgaccgggattgttgttgaatgtcaggatgaacgttcacaacataaaaacaaagcgaaggcactttctgtacttggtgctcgtatccacgctgcagaaatggcaaaacggcaacaggccgaagcgtctacccgtcgtaacctgctggggagtggcgatcgcagcgaccgtaaccgtacttacaacttcccgcaggggcgcgttaccgatcaccgcatcaacctgacactctaccgtctggatgaagtgatggaaggtaagctggatatgctgattgaaccgattatccaggaacatcaggccgaccaactggcggcgttgtccgagcaggaataatggaatatcaatactggttacgtgaagcaataagccaacttcaggcgagcgaaagcccacgccgtgacgctgaaatcttattggagtatgtcactggcagggggcggacttttattctggcctttggtgaaacgcagctgactgacgaacaatgtcagcaacttgatgcgctactgacacgtcgtcgcgatggtgaacccattgctcatttaaccggggtgcgagaattctggtcgttgccgttatttgtttcgccagcgaccttaattccgcgcccggatacggagtgtctggtggagcaggcactggcgcggttgcctgaacaaccttgccgtattctcgatctcgggacgggtaccggggcgattgcgcttgcgctggctagcgagcgcccggactgcgaaattatcgctgtagatcgtatgcctgatgctgtctccctggcacaacgtaatgcccagcatctggcgatcaaaaatatccacattctgcaaagcgactggtttagcgcgctagccgggcagcagtttgcgatgattgtcagcaatccgccgtatattgacgagcaggacccacatcttcaacaaggcgatgtccgctttgagccgctcactgcgctggttgcggcagacagtggaatggcagacatcgtgcatatcatcgaacagtcgcgtaacgcgctggtatccggcggctttctgcttctggaacatggctggcagcagggcgaagcggtgcgacaagcatttatcctcgcggggtatcatgacgtcgaaacctgccgtgactatggtgataacgagcgcgtaacgctcggccgctattatcaatgacaagtttttctacactgcttagtgttcatcttattagtatcgcgctttctgttgggctattaaccttacgtttctggctacgttatcagaagcatccacaggcatttgctcgctggacgcgcattgtgccgccggttgtcgatacggtgttattgttaagcggcattgcgttgatggctaaagcgcacatcctgccattttccgggcaggcacagtggctgactgaaaagctgtttggagttatcatttatatcgttttgggttttattgcactcgattatcgtcgtatgcacagtcagcaggcgcgcattattgccttcccgctggcgttggtggtgctgtacatcatcattaaactcgccaccacaaaagtaccgttactggggtaagtcatgagatcgttagctgatttcgaatttaataaagcgccattgtgcgaaggcatgatcctggcttgcgaagcaatccgccgcgattttccctcgcaagatgtttacgacgaactggagcgtctcgttagtctggcgaaggaagaaatcagccagcttctgcctttagaagagcagctggaaaaactgatcgcgctgttttacggcgactggggatttaaagcctcacgcggcgtttatcgtctttccgatgcattatggctggaccaggtgttaaagaatcgacagggcagtgcggtatcattaggtgcggttttattatgggtcgcgaatcgtctcgatttgccgctgctgccggtgattttccctacgcagctgatattgcgcattgaatgtccggatggcgaaatttggctgattaatccttttaacggtgaatcgttaagcgaacatatgctggacgtatggttaaagggaaatatcagcccgtcggcggaactgttttatgaagaccttgatgaagctgataacattgaggtaatccgcaaattgctggatacactcaaagcctcgttgatggaagaaaatcagatggagctggcgttacgcaccagcgaagctttattacaattcaaccctgaagatccctatgaaattcgcgatcgcgggttgatttatgcgcaactggattgcgaacacgttgcgttgaacgatttaagttatttcgttgaacagtgtccggaagacccgatcagcgaaatgatccgtgcgcaaataaataacatcgcgcataaacatattgtgctgcattaattaatcgacattttactcaagattaaggcgatcctatgaaacaaaaagtggttagcattggcgacatcaacgtagcaaatgacctgccgttcgtactgtttggcggtatgaacgtgctggaatctcgcgatctggcgatgcgcatttgcgagcactacgtaactgtgacccagaaactgggtatcccttacgtgttcaaagcctcttttgacaaagccaaccgctcctccatccactcttatcgtggaccgggcctggaagaagggatgaaaatcttccaggagttgaagcagacttttggcgtgaaaattatcaccgacgttcacgaaccaagtcaggcacagcccgttgctgatgtcgtggatgtgattcagttgccggcgtttcttgctcgccagactgacctggttgaagccatggcgaaaaccggtgcggtaattaacgtcaagaaaccacagtttgtcagcccgggacagatgggtaatatcgttgataaattcaaagaaggcggcaacgaaaaagtgattctttgcgatcgtggtgctaacttcggctatgacaacctggttgtcgatatgctgggcttcagcattatgaagaaagtgtctggtaactcgccggtgattttcgacgtgacccacgcactgcaatgccgcgatccgtttggcgcagcttccggtggtcgtcgtgctcaggtggctgagctggcacgagccggtatggcggtaggtctggcggggctgtttattgaagcgcatccggatccggaacatgcgaaatgtgatggtccatccgcgctgccgctggctaaactggaaccgttcctcaagcagatgaaagcgattgatgatctggtgaaaggtttcgaagaactggataccagcaagtaatcttttttgcttgaaaaataaagtcttagcgttctgcgttaagacttttttcatgggtgccagatacaaaaaaggccgcaggctgttacccctgcggccggtttcgggcgcatattgccatcacggcagcctgacgcccgttttcaccttacttccggttacgccaccagccgacaatcgctgcggtaataatccccgccaggatcggtgctgccaggtcgtgccagaaaatcatggcaaacttcgcgagcgtcatatagccgccttgttgtaatgacaacattttgcggctattcttgaattgttgatggttcaagattagcccccgttctgttgtcaggttttacctctcaacgtgcgggggttttctctttccagcaaccaatgccaccagggataaagcccccgcaacattgcgcctcaccggataattccggcttggtgtggatactacgactcaattcatcttcacttcatccctgaaatgtttgcaatgaagagtgcattccggtttttcaacagctgttacagtcgtttcatgagtactctggatgatgcttccagctcgggttgccaatatttacttgtggaagagataaagacaaaaatggccgcaggctgttacccctgcggccggtttcgggcgcatattgccatcacggcagcctgacgcccgttttcaccttacttccggttacgccaccagctgacaatcgctgcggtaataatccccgccaggatcggtgctgccaggtcgtgccagaaaatcatggcaaactgcgcgagcgtcatatagccgccttgttgtaatgacaacattttgcggctattcttgaagtgtctggtttcaagattagcccccgttttgttgtcaggttttacctctcaacgtgcgggggttttctctttccagcaaccaatgccaccagggataaagcccccgcaacattgcgcctcaccggataattccggcttggtgtggatactacgtctcaattcatcttcacttcatccctgaaatgtttgcaataaagagtacattccggcttttcaacagctgttgcagtggtttcgtgcaggttgtggtacaggctcgcaattctgattaacgagctgtccaggtagtatgaagaaatacaataagcaggaatttatcttatctcccccgatttccgtcatcggaggagatataactgtcaggcaaatatcgtcatcaaataggcggcaaacagtgccagatgcgctgcgccattgagcacgttagtacgtccggtggagaaggagatatggcacagcactaaagaggccaccatcaccaccatttctggcgcaccaagtgcaaactgtaattcgttacccgtcataaaggcaattagcgtgacgacaggtacggtaagcgaaatggttgctaacactgaaccaaagaacagattcatcgcgcgctggacctggttgttcaacactgcttttaacgcacctaaaccttccggcgacagaatcaacagagccaccaggaagccagtaaaggcgacaggggcattcatgctgtcgagcaatgtctccagcgggctggcattcattttggtgactgcaataacggcaatcagatggataatcaaccagatagcatgccacacgctgctatgggcagacggtttaccgtgatgcgggtcatcgtcatcactgtcatcttcgtgctcgtagacaaacaaactttgatgcgttttggtctggatcagcaaaaatacgccatacattgccgcagaaattaatgctaccagtaacgcctgaccggttgaaaaattcgccgcaggcagagccattggaaataccagtacgattatcgccagggggaacagcgcaattaaatactgcttgataccaaacagattcatatattgggtggcaaacttacgaccgcccaacaataatgaaaagccaaccagcccaccggtaacaatcataatgattgaatagagcgtatcacgcattagcgttggcgcggcgtcgccggttgccattaaagctgaaatcaaactgacttcaagaataaccactgaaaggctaagaataagcgaaccgtaaggttctcccaggcgatgggctaatacgtccgcatgacggacaacactaaaggcgctacttaaaataccaataagcgcaagaagattgatggcaatgaccactggtagtgtctggctgcttccccacaggaacagcactaccagcgccagaaccgggaaaataagcgaagtctccttgtggcgggtttttaccgcctcttgagcatttgacattatggttatccctttgcagatgaatttatcgaaaatgtaaaaaataggtaggaaaaataacagaaagtgtctggatatcggtaacattttacgaatttttaccccactgtcgattttttactcattgggacataaaaataagtattacgtttagacaatgtttgttttagcgtttcttaagaacagtctgacatgaaaattcttatgttttggcaagagtagatattgttgaccacacttaatgttcaactttgtaaaaggagtcaacgatgccgtataaaacgaaaagcgatctgccggaaagcgtaaagcacgttctaccgtctcatgcccaggatatctataaagaagcgttcaacagcgcatgggatcaatataaagataaagacgatcggcgtgatgacgccagtcgcgaagaaaccgcgcataaagtggcctgggctgctgtgaagcatgaatatgccaaaggggatgatgataaatggcataaaaaatcgtaaaaccggtagcttagttaaagctattcgtgcggtgttgccttgcaagtggtccgtggattgcatattgtcccgttagtggtttcaaaatgagcagtaaaaatgtccggaagacaccaaaaagttgtcgcagggaagtatgcagtggcggaggtgtaaggtgataacgcgtgatttcttgatgaatgccgattgtaaaacggcatttggtgccattgaagaatcactcttatggtcagcagagcaacgggcggcttcgctggcggcgacgctggcttgtcgacctgatgagggaccggtgtggatcttcggttatggatcgttgatgtggaatccggcactggagtttaccgagtcgtgcaccggtacactggttggatggcatcgcgcgttttgcctgcgcctgaccgccgggcgcgggactgcgcaccagccgggacggatgcttgcactgaaagagggcggacgcactacaggcgtcgcctatcgactgccagaagagacgctggagcaggaactaaccctgttgtggaagcgcgagatgattaccggctgttatctgccaacctggtgtcagcttgatcttgatgatggatgcacagtaaacgccattgtgtttattatggacccgcgacatccagaatatgaatctgacactcgcgctcaggtcatcgcgccgttgattgcggcggcgagcggtccgctgggaaccaacgcacaatacctgttttcactggaacaggagcttatcaaactgggaatgcaggacgatgggctgaatgatttgctggtatcggtaaaaaaactgctggcggagaattttccggatggtgtgttacgtccgggattcgcctgagtaaacttcccgcatagtggggcgtcagacgccccctcaaacattaaaatgtgagcactttatcggctgacagcgtccattgcgccagttccacaagagtaccgatttccaccccatcaatcagaggaagtgtactaatcccgcgcccgtcggtacaggttttgcacaatttcaccggtacattctgagcggtaaggatctccagcatttgctgaatgttgtagccttcccctggtttttgcccgcgcaacccggctgtgaccgcatcagacatgaggaacagacgcagatccagattgctctcctgctctcgtaacgcaatggccagccgcaagctgttaaacaaggattcgctcccgtaaggtgcgccattggcaacgatcacgattttttgcattatttactcctgtattcagggaattagacactcatcttctatcttactgcttctgcagcgtctgaccaatcggtcacatttttaaggattttcctgaaagcgcgagaaaatacgacaaaagttgccagtaatcgttattctttaaggctatggtttttcattattaccggaagttaccgacgttttgagccgtttcgttcctcgcattatcccgttttatttactcttgcttgtagcaggcggtacagctaacgcacaatctaccttcgagcaaaaagcggcaaatccctttgataataacaatgatggtctgccggatttaggcatggctcccgaaaatcatgatggggaaaaacactttgctgaaattgtgaaagatttcggcgaaaccagtatgaatgataacgggctggatactggcgagcaggcaaaagctttcgcattgggaaaagtccgcgacgcgcttagtcaacaggttaatcagcacgtagagtcctggctatcaccgtggggaaatgccagtgttgacgtcaaagtggataacgaaggacatttcaccggcagtcgtggaagctggtttgtgccgttacaagataatgatcgttatctcacctggagccagcttggtcttactcagcaggatgatgggttggtgagcaatgtgggcgttgggcaacgctgggcgcgcggcaactggctggtgggttataacactttttatgacaacttgctggacgaaaatcttcagcgagcgggctttggtgccgaagcgtggggcgaatatttgcgactatcggcaaacttttatcagccgtttgctgcatggcatgaacagacagccacgcaggaacaacggatggcgcgcgggtatgacctgacagcccggatgcgcatgccgttctatcaacacctcaataccagtgtcagcgtagaacagtattttggtgatcgtgttgatttgtttaactctggtacgggttatcacaatcccgtcgcgttgagtctgggattaaattacacccctgtgccattagtcactgtgacggcccagcataaacagggtgaaagtggcgagaatcaaaataacctcgggctgaatcttaattaccgctttggtgtaccgctcaaaaaacaactttctgcgggcgaggttgccgaaagtcagtcgttacgtggtagtcgctatgacaatccgcagcgaaataatctaccgactcttgagtaccgacagcgaaaaacgttaacggtgtttctggcgacaccgccgtgggatctaaaacctggcgaaacagtgccgctgaaattacaaatccgcagtcgttacggtattcggcaactgatttggcagggcgatacgcagatattaagtttgacgccgggcgcacaagccaacagcgcggagggctggacgctgatcatgcctgactggcagaacggggaaggggcaagcaatcactggcgattgtcggtggtggtggaagataaccaggggcagcgtgtctcctccaatgagatcacgctaacgcttgtcgaaccgttcgatgcattgtcaaacgacgaactgcgctgggaaccgtaatcagaaaatgcgctcctgatgcacccataccgctgcttccacgcgagacttgagcttcattttcttcagcatgtgcttgacgtgcacttttactgtgctttcggtgatatccaggcggcgggcaatcatcttgttcggcaaaccctgggcaatcagcttgagaatatcgcgctcgcgtggggttaactggttaacatcgcgctcagtagtggcacggttagcgcgcaagctggcggccagaacaggcgttaatgcttcgcttaataccatttcgccagcagctgcctgatgcaatgctttcagcagatcttccggttccatatcttttaacagatagccatccgcgccgcgtttcagtgcggtgaccacatcttcttcatggttagagacgctgaataccacaatgcgccctgagagggacttttcgcgcagtttatccagcgtttccagaccgttcatgccgggcatattgagatctaacaggatcagatcgggatcaagagattccgccagttcaataccctgttcgccattactcgcttcgccaaccacggtgatatctggtgccatactgataagctgttttacgccagttcgcagcatcgggtgatcgtcaatcagcaggatagtagccggttcctgattactcatgggtatctccttggacgtctgtgaaagttttttcgggaataaaggtgaccaccacttcggtgccacctgattcacgacggcggacgcggcaatcgcctcgtaaactttgcgcacggtcgcgcattattatcatgccgtagtgattgctgcggatggcattttcaggcacgccgcagccgttatcctggacggtcagtttgacctgattatcgttttgcgccaccgtcaccacgacttcactcgcttgcgaatgtttgagggcgttacttaatgcctcacgggcaatttgcaacaagtggattgcctgatgcgaaggcaccagacgaggcggcaattgataatccagcttcaccgggaagccaaatttggcgctgtactcttcgcaactcgcctccagcgccggacgtaatccaggctcggtgagctgcaagcggaatgtggtgagcaattcacgcaactgcgcccaggatgcattcagttcgttacggatctgacttaacagttcgcggctgctttctggcagcgcatcgccctgcatctgtaaacaactcacctgcatcttcatacaagagagagattgggcaatagaatcatgcagttcgcgcgcaatggtggcacgctcttccatcacgatcaactgttgctgacgttcctgatggcgatccaacgccagcgtggcggtgagttgttcaaccagggtatccaccagttgttgttgatcatggctaagatgacgcccctgcggcagggtcgccagcaaaataccgtactgcgtatgagagtcagccagccgccacttcagggttgtgccgcgatcgccaacgggtaatacgccgcgcgggcagagctggcagcctttatcatcacaagtcatatctggctggcaggtaaactcctgatgattctcttcatcatcagtatcataaacccgcagttcgatatcacgtagcagggttaaattctgtaagccgttgagtaccggtgacaggcgttcacacagcggggcgcgggaatgcaaacggcggttagcctgccataaaaatgagaggatctgatttttatgctccagcccggcggttttctcctgaacccgctgctcaagtacggcataactttcggccagttctgcagacatattgttcaacgcagttccaagcatcgccatttcgttgcgcccgctgatgtttgcgcgttgggtaaaatcgcgatggctgacggcactcgccattgccagcagttgccgccacggttgtagcagtcgcgcccgcaaccagataatagtgaacaccagtaaaagtgccataaataccgccattacccgatggaccagtaccactgtctcgatgcgcatttccgtggtgcggtcaaaaccagataccagctgatcaagcccggcaacaaactggctgacatccgctgacaccgtttctcggttttgtgcacgcatcagcgcagggatcagttcattacgccagtaatcttgtaaaccctgtaattgcgccagttgtccgtctcgttctgctgctcgagtcaactcggcgctaaatgccgtttgttccatctctttaattaagggcttgtctttctcgcttaatggcactgccgccaacagacggtaactttgcatgcgcagcgatcccgctttgttgatcgcatgggcgctgccctgaacgccttgcaccagccagccagaaaccgccatccctgccagtccaatagcagtagaaagcaacacaataagcgcaacctgattaaccagggtgagcggagagagacaacgtttaagcatgtaaacctcttccttcaggctttaaatgagcaataaccttaatgaatgtgacgatgcattctggaatggcagtattctcggctattggctgaagtatacccatacccggaaagagttactccttatttgccgtgtggttagtcgctttacatcggtaagggtagggattttacagcaccgtgaaaaatctcataatttttatgaaatcactgtactcactatgggtaatgataaatatcaatgatagataaagttatcttatcgtttgatttacatcaaatagcctttagctacagacactaaggtggcagacatcgaaacgagtatcagaggtgtctatgagtcactcatccgcccccgaaagggctactggagctgtcattacagattggcgaccggaagatcctgcgttctggcaacaacgcggtcaacgtattgccagccgtaacctgtggatttccgttccctgtctgctgctggcgttttgcgtatggatgttgttcagcgctgttgcggtgaacttaccgaaagtcggttttaattttacgaccgatcagctatttatgttgactgcgctgccttcggtttctggcgcgttattacgtgttccatactcctttatggttcctatcttcggtggtcgtcgctggacggcgttcagcaccggtattctgattattccttgcgtctggctgggttttgccgtgcaggatacctccacgccttatagcgtcttcatcatcatctctctgctatgcggctttgctggcgcgaacttcgcatccagtatggcaaacatcagcttcttctttccgaaacagaagcagggtggcgcgctgggtctgaatggtggtctgggaaacatgggcgtcagcgtcatgcagttggttgctccgctggtggtatcactgtcgattttcgcagtatttggtagccagggcgtcaaacagccggatgggactgagctgtatctggcgaatgcgtcctggatatgggtgccgttccttgccatcttcaccattgcggcgtggtttggcatgaacgatcttgctacctcgaaagcctccatcaaggagcagttgccggtactcaaacggggtcatctgtggattatgagcctgctgtatctggcaaccttcggctcctttatcggcttctccgcgggctttgcgatgctgtcaaaaacgcagttcccggatgttcagattctgcaatacgctttcttcgggccgtttattggtgcgctggcgcgttctgcaggtggtgcattatctgaccgtctgggcggaactcgtgtcacgctggtgaactttattctgatggcgattttcagcggcctgctgttcctgaccttaccgactgacgggcagggcggaagcttcatggcgttcttcgcggtcttcctggcgctgttcctgacagctgggctgggtagtggttccactttccagatgatttcagtgatcttccgtaaactgacaatggatcgcgtgaaagcagaagggggttctgacgaacgtgcgatgcgtgaagcggcaaccgacacggcagcggcgctgggtttcatctctgcgattggcgctattggtggcttctttatcccgaaagcgtttggtagctcgctggcattaacgggttcgccagtcggcgcaatgaaggtatttttgattttctatatcgcctgcgtagtgattacctgggcggtatatggtcggcattctaaaaaataaaccgttactcgtcatacttcgggttacatgtgctgcggctgcgttcattcaccccagtcacttactttagtaagctcctgggattcattcacttgccgccttcctgtaaaccgaattatatagagtaaaatatttgattatcctttgcgcggcatgatgtcgcgctttttttatgcgttatttagttacaacatactaatgttatatggcttatttcgccggatttcattaagagccattaatatgttacccatggggaatactccttaatacccatctgcataaaaatcttcatgctttaaataactacaggtataaaacgtcttaatttacagcatgttatgctttaactgttaattatcctaaaggggtatcttaggaatttactttatttttcatccccatcacacttgatcgttatcaattcccacgctgtttcagagcgttaccttgcccttaaacattagcaatgtcgatttatcagagggccgacaggctcccacaggagaaaaccgatgagtaaattcctggaccggtttcgctacttcaaacagaagggtgaaacctttgccgatgggcatggccagcttctcaataccaaccgtgactgggaggatggatatcgccagcgttggcagcatgacaaaatcgtccgctctacccacggggtaaactgcaccggctcctgcagctggaaaatctacgtcaaaaacggtctggtcacctgggaaacccagcagactgactatccgcgtacccgtccggatctgccaaaccatgaacctcgcggctgcccgcgcggtgccagctactcctggtatctttacagtgccaaccgcctgaaatacccgatgatgcgcaaacgcctgatgaaaatgtggcgtgaagcgaaggcgctgcatagcgatccggttgaggcatgggcttctatcattgaagacgccgataaagcgaaaagctttaagcaggcgcgtggacgcggtggatttgttcgttcttcctggcaggaggtgaacgaactgatcgccgcatctaacgtttacaccatcaaaaactacggcccggaccgtgttgctggtttctcgccaattccggcaatgtcgatggtttcttacgcatcgggtgcacgctatctctcgctgattggcggtacttgcttaagcttctacgactggtactgcgacttgcctcctgcgtctccgcaaacctggggcgagcaaactgacgtaccggaatctgctgactggtacaactccagctacatcatcgcctgggggtcaaacgtaccgcagacgcgtaccccggatgctcacttctttactgaagtgcgttacaaagggaccaaaactgttgccgtcacaccagactacgctgaaatcgccaaactgtgcgatctgtggctggcaccgaaacagggcaccgatgcggcaatggcgctggcgatgggccacgtaatgctgcgtgaattccacctcgacaacccaagccagtatttcaccgactatgtgcgtcgctacaccgacatgccgatgctggtgatgctggaagaacgcgacggttactacgctgcaggtcgtatgctgcgcgctgctgatctggttgatgcgctgggccaggaaaacaatccggaatggaaaactgtcgcctttaataccaatggcgaaatggttgcgccgaacggttctattggcttccgctggggcgagaagggcaaatggaatcttgagcagcgcgacggcaaaactggcgaagaaaccgagctgcaactgagcctgctgggtagccaggatgagatcgctgaggtaggcttcccgtactttggtggcgacggcacggaacacttcaacaaagtggaactggaaaacgtgctgctgcacaaactgccggtgaaacgcctgcaactggctgatggcagcaccgccctggtgaccaccgtttatgatctgacgctggcaaactacggtctggaacgtggcctgaacgacgttaactgtgcaaccagctatgacgatgtgaaagcttacaccccggcctgggctgagcagatcaccggcgtttctcgcagccagattattcgcatcgcccgtgaatttgccgataacgctgataaaacgcacggtcgttcgatgattatcgtcggtgcggggctgaaccactggtatcacctcgatatgaactatcgcggtctgatcaacatgctgattttctgcggctgtgtcggtcagagcgggggcggctgggcgcactatgtaggtcaggaaaaactgcgtccgcaaaccggctggcagccgctggcgtttgcccttgactggcagcgtccggcgcgtcatatgaacagcacttcttatttctataatcactccagccagtggcgttatgaaaccgtgactgcggaagaactgctgtcgccgatggcggataaatcccgttataccggacacctgatcgactttaacgtccgtgcagaacgcatgggctggctgccgtctgcgccgcagttaggcactaacccgctgactatcgctggcgaagcagaaaaagccgggatgaatccggtagattacaccgtgaaatcccttaaagagggttccatccgttttgcggcagaacaaccagaaaacggtaaaaaccacccgcgcaacctgttcatctggcgttctaacctgctcggttcttccggtaaaggccatgagtttatgctcaagtacctgctggggacggagcacggtatccagggtaaagatctggggcagcagggcggcgtgaagccggaagaagtggactggcaggacaatggtctggaaggcaagctggatctggtggttacgctggacttccgtctgtcgagcacctgtctctattccgacatcattttgccgacggcgacctggtacgaaaaagacgacatgaatacttcggatatgcatccgtttattcacccgctgtctgcggcggtcgatccggcctgggaagcgaaaagcgactgggaaatctacaaagccatcgcgaagaaattctccgaagtgtgcgtcggccatctgggtaaagaaaccgacatcgtcacgctgcctatccagcatgactctgccgctgaactggcgcagccgctggatgtgaaagactggaaaaaaggcgagtgcgacctgatcccaggtaaaaccgcgccacacattatggtcgtagagcgcgattatccggcgacttacgaacgctttacctctatcggcccgctgatggagaaaatcggtaatggcggtaaagggattgcctggaacacccagagcgagatggatctgctgcgtaagctcaactacaccaaagcggaaggtccggcgaaaggccagccgatgctgaacaccgcaattgatgcggcagagatgatcctgacactggcaccggaaaccaacggtcaggtagccgtgaaagcctgggctgccctgagcgaatttaccggtcgtgaccatacgcatctggcgctgaataaagaagacgagaagatccgcttccgcgatattcaggcacagccgcgcaaaattatctccagcccgacctggtctggtctggaagatgaacacgtttcttacaacgccggttacaccaacgttcacgagctgatcccatggcgtacgctctctggtcgtcagcaactgtatcaggatcaccagtggatgcgtgatttcggtgaaagcctgctggtttatcgtccgccgatcgacacccgttcggtgaaagaagtgataggccagaaatccaacggcaacccggaaaaagcgctcaacttcctgacgccgcaccagaagtggggtatccactccacctacagcgacaacctgctgatgctgactttaggtcgcggtggtccggtggtctggttgagtgaagccgatgccaaagatctgggtatcgccgataacgactggattgaagtattcaacagcaacggtgctctgactgcccgtgctgttgtcagccagcgtgttccggcagggatgaccatgatgtaccacgcgcaggaacgtatcgttaacctgcctggttcggaaattacccaacagcgtggtggtatccataactcggtcacccgtatcacgccgaaaccgacgcatatgatcggcggctatgcccatctggcatacggctttaactactacggcaccgtaggttctaaccgcgatgagtttgttgtagtgcgtaagatgaagaacattgactggttagatggcgaaggcaatgaccaggtacaggagagcgtaaaatgaaaattcgttcacaagtcggcatggtgctgaatctcgataagtgcatcggctgccacacctgttcagttacctgtaaaaacgtctggaccagccgtgaaggcgtggaatacgcgtggttcaacaacgtggaaaccaagccgggtcagggcttcccgactgactgggaaaaccaggaaaaatacaaaggcggctggatccgtaaaatcaacggcaaactgcagccgcgcatgggtaaccgtgccatgttgctgggtaaaatcttcgctaacccgcatctgccggggatcgacgattattacgagccgttcgattttgactatcagaacctgcataccgcgccggaaggcagcaaatcgcagccgattgcccgtccgcgttcgctgattaccggggaacggatggcgaaaatcgaaaaagggccgaactgggaagatgacctgggtggtgagtttgacaaactggcgaaagacaagaacttcgacaacatccagaaggcgatgtatagccagttcgaaaacacctttatgatgtatttgccgcgcctgtgcgaacactgcctgaacccggcatgtgtggcgacctgcccgagcggtgcgatttacaagcgtgaagaagatggcatcgtcctgatcgaccaggataaatgccgtggctggcgtatgtgcatcaccggatgcccgtacaaaaaaatctacttcaactggaagagcggtaagtctgagaagtgcatcttctgctatccgcgtattgaagcgggtcagccgaccgtgtgctcagaaacctgtgtcggtcgtatccgttatcttggcgtgctgctgtacgatgccgacgcgattgaacgtgcagccagcaccgagaacgagaaagatctttaccagcgtcagctggaggtgttcctcgatccgaacgatccgaaagtcatcgagcaggcgattaaagacggtattccgctgagcgttattgaagccgcacagcagtcgccggtttataaaatggcaatggaatggaaactggcgctgccgctgcatccagaatatcgcacactgccgatggtctggtacgtgccgcctctgtctccgattcagtctgcggcagacgcgggtgagctgggtagcaacggcattctgccagacgtcgaaagcttgcgtattccggtacagtatctggcgaatctgctgaccgccggtgataccaaaccggtactgcgcgcactgaaacgtatgctggcgatgcgtcattacaaacgtgctgaaaccgttgacggtaaagttgatacccgtgcgctggaagaggtcggtctgaccgaagcccaggcacaggagatgtaccgttatctggcgattgctaactacgaagatcgctttgtggtgccgagtagtcatcgtgaactggcacgggaagccttcccggagaaaaatggctgcggctttacctttggtgatggctgccacggttcagataccaaattcaatctgttcaacagccgtcgtatcgatgccatcgatgtgaccagcaaaacggagccgcatccatgatcgaactcgtgattgtatcgcgtctccttgaatatccggatgctgccttatggcagcatcaacaagagatgtttgaggcgattgctgcgtcgaaaaatctgtcgaaagaagatgcccatgcgctgggcattttcctgcgcgatttaacggcgatggatccgctcgatgcccaggcccagtacagcgaactgttcgaccgtggccgcgccacgtcactgttgctatttgaacatgttcacggtgaatcccgtgaccgcggccaggcgatggtggacctgctggcgcagtacgagcagcacggcttgcagttaaacagccgcgaattaccggaccatctgccgctgtatctggagtacctgtcgcagctgccgcaaagcgaagccgtggaaggtttgaaagatatcgcgccgattctggcattgctgagcgcgcgtctgcaacagcgtgaaagccgttatgccgtgatgtttgatctgctgctgaaattggccaataccgctatcgacagcgacaaagtggcggaaaaaattgccgacgaagcgcgcgatgatacgccgcaggcgctggatgctgtctgggaagaagagcaggttaaattctttgctgacaaaggctgcggtgattcagcaatcactgctcatcagcgtcgctttgccggtgccgtcgcgccgcaatatctgaatatcaccaccggaggacagcactaatgcaattcctgaatatgttcttctttgatatctaccgtacatagccggggcggtcttcctgattggtagctggctgcgttatgactacgggcagtacacctggcgcgcggcgtccagccagatgctggatcgcaaagggatgaacctggcgtcgaacctgttccatatcggtattctggggatttttgttggtcacttcttcggtatgctgacgccgcactggatgtatgaagcctggctgccgattgaagtgaaacagaaaatggcgatgtttgctggtggtgccagcggcgtgctgtgtctgattggcggcgtgctgttgctgaagcgtcgtctgttcagcccacgcgtgcgtgcaaccactaccggagcggatatcctgatcctgtcgctgctcgttatccagtgcgcgctgggcctgttgaccattccgttctccgctcagcatatggacggtagcgagatgatgaaactggttggctgggcgcagtcggtggtgaccttccacggtggcgcttctcaacacctcgatggtgtggcgtttatcttccgtctgcacctggtgctggggatgacgttattcctgctgttcccgttctcgcgtctggtacacatctggagcgtaccggtggagtatctgacacgtaagtaccagctggtgcgcgctcgtcactaagcgaattttagttcacatagaccctgcttcggcggggttttttatgggcacggtgcggggtgagttgtcggatgcgcttcgcttatccgacctacaggggaggatattgtaggcccggtaaacgtggtgccatcgggcaaaattggctcggagtaacaggttttgattatttaaggaagtgatggtggtgggggaaggattactcaacgctgcgcgcttcgcccttcgggtcgttgcctgcggcaacgctctctcgctggcgctcgagtcgaaccttggtcgaggcttctcatccttccccgcatgggcagaatatttaatcgcggattcgtttgagagttcacggacttttgaaagtgatggtggtgggggaaggattcgaaccttcgaagtcgatgacggcagatttacagtctgctccctttggccgctcgggaaccccaccaggggtaattcaaattttgaggtaatacttgagatggtggtgggggaaggattcgaaccttcgaagtcgatgacggcagatttacagtctgctccctttggccgctcgggaaccccaccacggggtaatgctttttactggcctgctcccttatcgggaagcggggcgcatcatatcaaatgacgcgccgctgtaaagtgttacgttgagaaaaatgaactggttgcgtaattttcatccgtaacggattaaaggtaaccagttatttttgctggcgattaaagaataatcgtccgattaccgtaaacaaagacgcgctgtgccagtactttgtatagcgcacgacttaagacgtttttctcgacgtcacgacctgcgcgcatcatatcttcagctgtgtaggtatgatcgacatgaataacgtcctgcatgatgattgggccttcgtccagattgtcattcacatagtgagcggttgcgccaataatcttcacaccacgttcataggcctggtgataaggacgtgcgccgataaacgcaggcaggaatgaatggtgaatattgatgattttattcgggaagcgtgccacaaattccggcgttaatacccgcatatacttcgccagcaccacatagtcaggttgataagcatcaatggcgtccgccatcttttgatcgtgctcgttgcggcttaacccttcatggcttaccagctcaaacggaatatcaaaacgctcaaccagagaacgtaaagtatcgtggttaccaataactgccgcgatttcgacatccaggccgccgtaattggctttcatcaacaaatcgccaaggcaatgcgcttctttagtgaccagaatcactatccggcgacgaccggcaggattcagctcacgcacggagccttctggcaatgcgctatcgagatccgccagcagggtggaatcattaaaaatcccttccagttccgtgcgcataaaaaagcgcccggtacggtgatcaacaaattcattgttctgtacgatatttaactcgtgcttgtagcaaatattggtaatacgtgcgatcagacctttttggtccggacaaatagtacgcagaactttacgttggagtgaatgcattgctggaaaaaccttgttgagagtgtttgctaaaccgtaccgtcaaccattattggccgcagcactttttaaattttttacctgaaccacaagggcagggatcgttgcgaccaaactgcggacgtgtaccgtcaatatagtaccattgaccgttttctttcaaaaatcgcgaacgttcaattattgcacctgttttaccaccttcggtaaatcgagcaacaaaactgacaaatccgatattgtcggcgtcctgccaacaatgttcaaatacggtcaatcccaaccattcagtatgcgcaaatccggccatcaattcggcacgtaacgccgctgctccacaagagggatgccaggtctttattaaataatctgcgtcttgcatcacaaaagcgcagtaacgcgaacgcatgagatgttctggatcaggtgcaaccttttcaccagacacataagggtggcaacataggctatactcgacagcactaccacagggacaaagctgagacacaaataatctccctggaaacaataacggcgtattaaccgcctgagtagcactatgttaaccgagcagtagcgatgtggctacgattgcattccaggggaatcttgcgggaataatgagaaagataaaaatagggctggcgttgggatctggcgcggcgagaggttggtcgcatattggcgttattaatgcgctaaaaaaagtgggtattgaaattgatatcgttgcaggatgttcaattggttcgctggtgggcgctgcctatgcatgcgatcgattatctgcgctggaagattgggtgacctctttcagttattgggatgttttacgcctgatggatctctcctggcagcgcggtgggttactgcgcggcgagcgtgtcttcaatcaataccgcgaaataatgccggaaacagagatcgaaaattgttcccgtcgctttgcggctgttgccaccaatttaagtacgggacgtgaattatggtttactgaaggcgatctccatcttgctattcgcgcatcatgcagtattccaggactcatggcacctgttgcacataacggctactggctggttgatggagcagtcgttaacccaattcctatttccctcacgcgtgcattgggggctgatattgtgatagcggttgacctgcagcacgatgctcatttgatgcaacaagatttgctctcctttaatgtcagtgaagaaaatagcgagaatggtgattctctgccgtggcatgcgcgtctgaaagaaaggttaggcagcataacgacacgtcgggcggtgacagcgccaacggcaacagagattatgaccacttctatccaggtgctggagaaccgccttaaaaggaaccgcatggcaggtgatccgcccgatattctgattcaacctgtttgcccgcaaatatctacgcttgatttccatcgcgcgcacgctgccattgcggccggacagctggcagtggaaaggaaaatggacgaacttttgccgttggtacgcaccaacatttgaccagaatttttatctacacttaagttaattctgacaggcgcaggtggcaatagcatgccactattgagtaaagccagtcaggggagagaacatgacgcagccattggtcggaaaacagattctcattgttgaagatgagcaggtatttcgctcgcttctggattcatggttttcctcattgggagcgacaacggtactggcggctgatggggtggatgcccttgagttgctgggaggtttcactccagacctgatgatatgtgatatcgcgatgccacgaatgaacgggcttaaactgctggagcatatacgtaacagaggcgaccagaccccagttctggtgatatctgccactgaaaatatggcagatattgccaaagcgttacgtctgggcgttgaagatgttttgctgaaaccagttaaagatctgaatcgcttgcgcgagatggtttttgcctgtctctatcccagcatgtttaattcgcgcgttgaggaagaggaaaggctttttcgcgactgggatgcaatggttgataaccctgccgcagcggcgaaattattacaggaactacaaccgccggttcagcaggtgatttcccattgccgggttaattatcgtcaattggttgccgcggacaaacccggcctggtgcttgatattgccgcactttcggaaaacgatctggcattttattgccttgatgtcacccgagctggacataatggcgtacttgctgccttgttattacgcgcattgtttaacggattattacaggaacagcttgcacaccaaaatcaacggttgccagagttgggcgcgttattgaagcaggtaaaccatttacttcgtcaggccaatctgccggggcagtttccgctattagttggctattatcatcgcgaactgaaaaatctcattctggtttctgcgggtctgaatgcgacgttaaataccggcgaacaccaggtgcaaatcagtaatggtgttccgttaggcactttaggtaacgcttatttgaatcaattgagccagcgatgcgatgcctggcaatgccaaatatggggaaccggtggtcgactgcgcttgatgttgtctgcagaatgagcaaacgataacgcgggctaaatttgcattacctgctaatgtcggctggtggtactatcgtcgccattcgtataagtaattgtcttaattatgctaactcgcctccttttcagaacttagccccttcggggtgctgatatactgggatgcgatacagaaatatgaacacgttcaaaacacgaacagtccaggagaatttaaatggctgccattaatacgaaagtcaaaaaagccgttatccccgttgcgggattaggaaccaggatgttgccggcgacgaaagccatcccgaaagagatgctgccacttgtcgataagccattaattcaatacgtcgtgaatgaatgtattgcggctggcattactgaaattgtgctggttacacactcatctaaaaactctattgaaaaccactttgataccagttttgaactggaagcaatgctggaaaaacgtgtaaaacgtcaactgcttgatgaagtgcagtctatttgtccaccgcacgtgactattatgcaagttcgtcagggtctggcgaaaggcctgggacacgcggtattgtgtgctcacccggtagtgggtgatgaaccggtagctgttattttgcctgatgttattctggatgaatatgaatccgatttgtcacaggataacctggcagagatgatccgccgctttgatgaaacgggtcatagccagatcatggttgaaccggttgctgatgtgaccgcatatggcgttgtggattgcaaaggcgttgaattagcgccgggtgaaagcgtaccgatggttggtgtggtagaaaaaccgaaagcggatgttgcgccgtctaatctcgctattgtgggtcgttacgtacttagcgcggatatttggccgttgctggcaaaaacccctccgggagctggtgatgaaattcagctcaccgacgcaattgatatgctgatcgaaaaagaaacggtggaagcctatcatatgaaagggaagagccatgactgcggtaataaattaggttacatgcaggccttcgttgaatacggtattcgtcataacacccttggcacggaatttaaagcctggcttgaagaagagatgggcattaagaagtaacatccgtatcggtgttatccacgaaacggcgttgagcaatcgacgccgtttttttatagcttattcttattaaattgtcttaaaccggacaataaaaaatcccgccgctggcgggattttaagcaagtgcaatctacaaaagattattgcttgatcaggaaatcgtcgagggatttaccttgctcatccattgctttttgattacagctggagtacggccttggccagtccaggttttagtttcgccgttttcgtcaacgtagctatattttgccggacgctgagcacgtttagctttggtgccagatttaacggcagcaaggctattcagcagttcgttcgggtcaataccgtcagcgatcagcatttcgcgatattgctgcagcttacgagtgcgctcttcaacttcagcagcagccgcgctttcttcttcgcgacgttcgttaacaacaacttctaatttttccagcatttcttccagcgtttcaagtgtacattctcttgcctgcgcacgaagagtacggatgttgttcagaattttaagtgcttcgctcattgtagtaatctcaaacttatattgggggtggtttgttgaggtaataatagagccttaaattcagttgtgcaatagccaggaatgtaaggaattcaaaattgttctttattttgtgccgccaataaatatcttttcataaaattagccagaaaagacgcggcatatagccctatttacaccgatgatttcgcagcacgtgaggttaaaacttcctgattcatgtcacattttatggggagattatcgtaggctgacgacctttcagtcttctgtattagttgtgtttacgagaattccctattaagcgaatgatgaaaagtagaacagtcgcaataagagcatggacttagtattgcactatctcctggaggtcaacagagggctattacttgcgcaacaggttaaagattgtgaatagttaccagcagtcatttacccgcttataacaagcgaggcagttgtaatgatagctcagaaggattatgcaaggcttcgtaagggagaacgcatatacccacttctgtgcatactgttgagctgaaaaactgacgaattatgataaactccagccaactttatttcatatcattgagggcctgtggctgatggcacagctatatttctactattccgcaatgaatgcgggtaagtctacagcattgttgcaatcttcatacaattaccaggaacgcggcatgcgcactgtcgtatatacggcagaaattgatgatcgctttggtgccgggaaagtcagttcgcgtataggtttgtcatcgcctgcaaaattatttaaccaaaattcatcattatttgatgagattcgtgcggaacatgaacagcaggcaattcattgcgtactggttgatgaatgccagtttttaaccagacaacaagtatatgaattatcggaggttgtcgatcaactcgatatacccgtactttgttatggtttacgtaccgattttcgaggtgaattatttattggcagccaatacttactggcatggtccgacaaactggttgaattaaaaaccatctgtttttgtggccgtaaagcaagcatggtgctgcgtcttgatcaagcaggcagaccttataacgaaggtgagcaggtggtaattggtggtaatgaacgatacgtttctgtatgccgtaaacactataaagaggcgttacaagtcggctcattaacggctattcaggaaaggcatcgccacgattaataagaatttctttactgacagggtgagcagggcacttttatcctgtcagttcgttttacgcacttcttccgggctatatacccttctcggcagttttttaacgccgctatacgcctcacagggctcttaagcaccgacgttgacttgtgacctgtaaagtacaatatccctgtgtttaggcgttatacatcgtcgcaaatatgatgaaggctaatgctgtcggtttatggaaaagttgctttgggtaaacaaaaaatacggccccagaagggcaatgccgttcacttaagaggagcggcactatgtttcacaggataacgggtttttgatatcttaaccgacctcggccttgatggtcgggggcgttttgttatgaacaccacttccagagcaccctgaagatgctccagtcgtttcgggatggtccctggtgacgccgtgtttcccagctctatcatttctgatgcgatattcttccacgcaggcagtagccagtggcggttacaacccttctggttcagcgtcagcagcaggtcttcgctgtaaaaaagtttatcaaacaacgtaatagagttatccgggatggtggcgagcatggagtgggccagcacagtttcgctctgccggtaaggtgcggtcacggcattcagcagaatatgacttcccaggttcattaaggccaccagacgcataaccgggtaggcgttctgccgcttagtggatgtgttggcagacccataatattcacgcagctcgggtttatcagtcaggtgtcctgaactgtgcgccatcaatggcaaaaagttgcaggccgtgccagtcatccttcaggtaacgttccgcgcccctgtctgtgcggtctggcggaagagccattccactggggcggcccccacgcgctgacgcgcctgggtgacagcgctgcgggccagcaggttcatccccgcttcgccatccgcgctcaggttcagacggcgaacaacatcggtaattggctcattgcaccaccatccagataaccatgtcccccggtaaacgacggcggcgaacggtcgcatgagcagaaagcgtcaggcagtgttgtatccactcggtgggaaggtgttctgcaaatagttgtgcagagggcggaggcataagcggatggtcactgaaatcgagcagatcattgagaagtggcataagaaaacggctccctgttgtggaagccgttatagtgcctcagtttaaggatcggtcaactaatccttaactgatcggcattgcccagaaggggccgtttatgttgccagacagcgctactgattaagcggattttttcgcttttttctcagctttagccggagcagcttctttcttcgctgcagtttcaccttctacataatcacgaccgtagtaggtatccagcagaatctgtttcagctcggagatcagcgggtaacgcgggttagcgccggtgcactggtcatcgaatgcatcttcagacagtttatccacgttcgccaggaagtctgcttcctgaacgccagcttcacggatagatttcggaatacccagttcagctttcagcgtttccagccatgccagcagtttctcgatcttagcagcagtacggtcgcccggtgcgctcagacccaggtggtcggcaatttcagcataacgacggcgagcctgcggacggtcatactggctgaatgcagtctgcttggtcgggttgtcgttcgcattgtagcgaataacgttacaaatcagcagggcgtttgccagaccgtgcggaatatggaactgggaacccagtttgtgcgccattgagtgacatacacccaggaaggcgttcgcaaacgcgatacccgcgatagtcgctgcactgtgaacacgttcacgcgctaccggatttttagacccttcgtggtaggacgctggcagatattctttcagcagtttcagtgcctgcagagcctgaccatcagagaactcagatgccagtacagaaacataagcttccatggcgtgagttactgcgtccagaccaccgaaagcacacagggacttcggcatgtccataaccaggttggcgtcgacaatcgccatatccggagtcagcgcatagtctgccagcggatatttctgaccagtagcgtcgtcagttacaaccgcaaacggagtgacttcagaacctgtaccagaagtggtggtgacagcgatcattttcgctttcacgcccattttcgggaacttgtagatacgtttacggatatccataaagcgcagcgccagctcttcgaagtgagtttccggatgttcgtacataacccacatgatcttcgcggcgtccatcggggaaccaccacccagcgcgataatcacgtctggtttgaaggagtttgccagttctgcacctttacgaacgatgctcagggtcgggtccgcttctacttcgaagaagacttcagtttcaacgcctgctgctttcagtacggaagtgatctgatcagcataaccattgttgaacaggaagcggtcagtcacgatgagcgcacgtttgtggccatcagtaatcacttcatccagcgcgattggcagggagccacggcggaagtagatagatttcggaagtttgtgccacaacatgttttcagctcgcttagcaacggttttcttgttgatcaggtgtttcggaccaacgttttcagagatggagttaccaccccaagaaccacaacccagagtcagggaaggtgcgagtttgaagttatacaggtcaccgataccaccctgagacgctggggtgttaatcaggatacgagccgttttcattttctgaccgaagtaagaaacgcgagccggttggttatcctggtcagtgtacaggcaagaggtatgaccgataccgcccatagcaaccagtttctctgctttttctaccgcgtcttcgaaatctttagcgcggtacattgccagagtcggggacagtttttcatgtgcgaacggttcgctttcatcaacaacggtcacttcaccgatcagaatcttggtgttttctggtacagagaagcctgccagttcagcaattttataggctggctgaccaacgatagccgcgttcagcgcaccgtttttcaggataacatcctgaacagctttcagctctttaccctgcaacagatagccgccgtgggttgcaaaacgttcacgtacagcgtcataaacagagtcaacaacaacaacagactgttcagaagcacagattacgccgttgtcgaaggttttggacatcagtacagatgcaactgcacgtttgatatcagcagtttcatcgataacaactggagtgttgcccgcgcctacaccgatagctggtttaccggagctgtatgcggctttaaccatgcccggaccaccagtcgcgaggatcaggttgatgtctgggtggtgcatcagtgcgttagacagttcaacagaaggttgatcgatccagccgatcagatctttcggagcaccggcagcgatagcagcctgcagaacgatatcagccgctttgttggtggcatcttttgcacgcgggtgcggggagaagataatggcgttacgggtcttcagactgatcagcgatttgaagatagcagttgaagtcgggttagtggtcggaacgataccgcaaataataccgattggttcagcgatagtgatggtaccaaaagtgtcgtcttcagacagaacaccacaggttttttcatctttataggcgttgtagatatattcagaagcaaagtggtttttgatcactttatcttcgacgatacccatgccggattcggcaacggccattttcgcgagtgggattcgagcatctgcagcagccagagcggcggcgcggaagattttgtctacttgctcttgagtgaaactggcatattcacgctgggctttttttacacgctctacgagtgcgttaagttcagcgacattagtaacagccataatgctctcctgataatgttaaacttttttagtaaatcatctgctcgaatacgagagtatagtcagtgcggtgatgatttgcttaacctatgaaaatcaaaagcttactcgcgctcacactcactgtgatttactaaaagagtttaaacattagagttattatctctaatgcgtcacttccaggtggcgtaagcaagattactcacttctgggtactgattacgtgatccaaatcaaattttgcaaagctgacacctttcagcatcgcttttcgccattatagctaacagttaataaattgtagtatgatttggtggctacattagcatgttttgcacaactagataacaataacgaatgatagcaattttaagtagttaggaggtgaaaaatgctgtcaaaaggcgtattgtcagcgcgtcttttcaaccttatttatggctaacattatccggcttttgcttcggagctaaccgtgattcagaccttttttgattttcccgtttacttcaaatttttcatcgggttatttgcgctggtcaacccggtagggattattcccgtctttatcagcatgaccagttatcagacagcggcagcgcgaaacaaaactaaccttacagccaacctgtctgtggccattatcttgtggatctcgctttttctcggcgacacgattctgcaactttttggtatatcaattgattcgttccgtatcgccgggggcatcctggtggtgacgatagcgatgtcgatgatcagcggcaagcttggcgaggataaacagaacaagcaagaaaaatcagaaaccgcggtacgtgaaagcattggtgtggtgccattggcgttgccgttgatggcggggccaggggcgatcagttctaccatcgtctggggtacgcgttatcacagcattagctatctgtttggtttctttgtggctattgcattgttcgctttatgttgctggggattgttccgcatggcaccgtgctggtacgggttttacgccagaccggcatcaacgtgattacgcgtattatggggctattgctgatggcattggggattgaatttatcgttactggtattaaggggattttccccggcctgcttaattaattcctttcaaatgaaacggagctgccatgctccgtttacttcgtcattatttttactttgttcccgcgcagttatcaaaagcaaaaggaataggtaaaaatattcttctcaaattacagttagttataaggatttccttaactgcttctcctcaccatcatgttattttcgccacatcataatcctggacttgctgaagaataattgaaatgatattagtaattccactgcctttggtagaggaaagtgctaaataataatcaattgttaaattattgtgcatttcactactggaactgtaatcagaaaagatagacatgcttagctaatctctatttgattgaattgaaagatgtttgttaaggcatggatgcaagctatagattctgatacggtcaataaaagagaattgcttaacaattttgcaaaatgtattggcgagtaagaaccgcatttggtactttccgggcaaccgccagacgattatttattggtaatgagaataattaacaattaaagagcgtcgcgaaagaataatgtgtctcgacaggggagacacagtacgaatcgacataaggtgatcgtctgaatcaccagaataaataaagtcggtgatagtaatacgtaacgataaagtaacctgacagcagaaagtctccgagcctgtgcagggtcccaatccgggattacacatgctggttaataccagtaattataatgagggagtccaaaaaacaatgaccaacatcaccaagagaagtttagtagcagctggcgttctggctgcgctaatggcagggaatgtcgcgctggcagctgatgtacccgcaggcgtcacactggcggaaaaacaaacactggtacgtaacaatggttcagaagttcagtcattagatccgcacaaaattgaaggtgttccggagtctaatatcagccgagacctgtttgaaggcttactggtcagcgatcttgacggtcatccagcacctggcgtcgctgaaacctgggataataaagacgcgaaagtctggaccttccatttgcgtaaagatgcgaaatggtctgatggcacgccagtcacagcacaagactttgtgtatagctggcaacgttctgttgatccgaacactgcttctccgtatgccagttatctgcaatatgggcatatcgccggtattgatgaaattcttgaagggaaaaaaccgattaccgatctcggcgtgaaagctattgatgatcacacattagaagtcaccttaagtgaacccgttccgtacttctataaattacttgttcacccatcaacttcaccggtgccaaaagccgctatcgagaaattcggcgaaaaatggacccagcctggtaatatcgtcaccaacggtgcctataccttaaaagattgggtcgtaaacgaacgaatcgttcttgaacgcagcccgacctactggaacaacgcgaaaaccgttattaaccaggtaacctatttgcctattgcttctgaagttaccgatgtcaaccgctaccgtagtggtgaaatcgacatgacttataacaacatgccgatcgaattgttccagaagctgaaaaaagagatcccggacgaagttcacgttgatccatacctgtgcacttactattacgaaattaacaaccagaaaccgccattcaacgatgtgcgtgtgcgtaccgcactgaaactaggtatggaccgcgatatcattgttaataaagtgaaagcgcagggcgacatgcccgcctatggttacactccaccgtatactgatggcgcaaaattgactcagccggaatggtttggctggagccaggaaaaacgtaacgaagaagcgaaaaaactgctggctgaagcgggttataccgcagacaaaccgttgaccatcaacctgttgtataacacctccgatctgcataaaaagctggcgattgctgcctcttcattgtggaagaaaaacattggtgtaaacgtcaaactggttaaccaggagtggaaaacgttcctcgacacccgtcaccagggtacttttgatgtggcccgtgcaggctggtgtgctgactacaacgaaccaacttccttcctgaacaccatgctttcgaacagctcgatgaataccgcgcattataagagcccggcctttgacagcattatggcggaaacgctgaaagtgactgacgaggcgcggcgcacagctctgtacactaaagcagaacaacagctggataaggattcggccattgttcctgtttattactacgtgaatgcgcgtctggtgaaaccgtgggttggtggctataccggcaaagatccgctggataatacctatacccggaatatgtacattgtgaagcactaatggcaatacgtggggcaggagtgtcctgctccacggtgtctgatttttatcgcattacagaaggcacaggccagaaggtagggcaatgttaaaatttattctacgtcgctgtctggaagcgattccgacgctatttattcttattactatttcgttctttatgatgcgcctcgcgccgggaagcccttttaccggcgaacgtactttaccgccagaagtgatggccaatatcgaagcgaaatatcatcttaatgatccgatcatgacacagtatttcagctacctgaaacaactggcgcacggtgatttcggtccatcgtttaaatataaagattattcggtcaatgacctggttgcatccagttttcccgtttctgccaaactgggagccgcagcatttttccttgcggtaatactgggtgttagtgctggcgttattgccgcattaaaacaaaacaccaaatgggactataccgtgatggggctggcaatgaccggggttgttatccccagttttgtggttgcgccattattagtcatgatatttgcgatcattttgcattggctgccgggcggtggctggaatggtggggctcttaaattcatgatattgccgatggtggcgttgtcactcgcttatatcgccagtattgcgcgtattacccgtggctctatgattgaagtattacactccaactttattcgtactgcccgggcgaaagggttacctatgcggcggatcattttacgccacgcattaaaacctgctctgttacccgtgctctcctatatgggccccgcatttgtcggcattattaccggttctatggtcatcgaaaccatttatggtttgccggggattgggcaactgttcgttaatggcgcattgaaccgtgactattccttagtgttaagcctgaccatcctggttggtgctttaaccattttgtttaatgccattgtcgatgtgctatatgcggttatcgacccgaaaatccgttactgatactggagctcgcgatgatgttaagtaagaaaaacagcgagacgctggaaaatttcagtgaaaagctggaggtcgaagggcgcagcttgtggcaggacgcacgtcgacgttttatgcataaccgtgcggcggttgccagtctgatagtgctggtgctgatcgcgttatttgtaatcctggcaccgatgctttcgcagtttgcctatgacgatactgactgggcgatgatgtccagcgccccggatatggagtccggtcactactttggtactgactcatccggtcgcgacctgcttgtgcgcgttgcgattggcgggcgtatctcactcatggtcggtgttgctgcggcactggtggcagtggtcgtggggacactttacggttcgctttccggttatctgggcggtaaagtggattcggtaatgatgcgtctgctggaaatcctcaactccttcccattcatgttcttcgtcattttgctggtgacctttttcggtcaaaacatcctgctgattttcgtggcgattggcatggtttcctggctggatatggctcgtattgtgcgtgggcaaaccctgagtctgaagcgcaaagagtttattgaggcggcacaagttggcggtgtatcgacatcgggcattgttattcgccacattgtgccgaatgtactcggtgtggtggtggtctacgcatcacttctggtgcccagcatgatcctctttgaatctttccttagcttcctggggttgggtacgcaagagccgttaagcagctggggtgcattgctgagtgatggcgcgaactcgatggaagtctctccatggttattgttgttcccagcgggattcctcgtggtgacgctgttttgtttcaactttatcggcgatggcttgcgtgatgccctcgacccgaaagatcgttaaggagtgcagccatgagcgtaattgaaactgcaactgtgccgctcgcacaacaacaggctgacgcactgctgaacgtgaaagatttgcgtgtcacctttagtaccccggacggcgacgtcacggcggtcaatgatttgaatttttccctacgtgccggagaaacgctgggtattgtaggtgagtctggttcgggtaaatcgcaaactgcatttgcgttgatgggcctgttggctgccaacggacgtattggcggatcggcaaccttcaatgggcgtgaaatcctcaatttgccagagcatgaactcaataaactgcgcgctgaacaaatctcaatgatttttcaggacccaatgacttcgttgaatccctatatgcgcgtcggtgagcagttaatggaagtgctgatgctgcataagaacatgagcaaagctgaggcgtttgaagagtcggtgcggatgctcgatgcggtaaaaatgccggaagcgcgtaaacgcatgaaaatgtacccgcacgaattttctggcggcatgcgtcagcgagtcatgattgcgatggcattgctatgtcgacctaagctactgattgcggatgaacccactactgcgctggacgtcaccgtacaggcgcagatcatgacgctattaaatgaactgaagcgggaatttaataccgccatcattatgatcacccacgatcttggcgtggtggcggggatctgtgacaaagtgctggtaatgtacgccgggcgcacgatggaatatggcaatgcgcgcgatgtcttttatcaacccgttcatccttattctatcggtttgctcaacgcggtgccgcgtcttgatgcggaaggtgaaacaatgttgaccatcccgggtaatccgccaaacttgctgcgattaccgaaaggttgcccgttccagccacgttgtccacatgcgatggaaatttgtagtagcgcaccgccgctggaagagtttacgcctggccgtctgcgtgcttgctttaaaccggtggaggaactgttatgaatgctgtaactgaaggaagaaaagtcctccttgaaatcgccgatcttaaagtgcactttgaaatcaaagatggcaaacagtggttctggcaaccgccgaaaacgctcaaagccgtcgatggtgtcactcttcgcctgtatgaaggggaaacattaggtgtggtaggggaatcgggatgcggtaagtccacctttgctcgcgccatcatcggtttggtcaaggcgaccgacggtcatgttgcctggttaggtaaagagttgctgggcatgaagcccgatgaatggcgtgccgttcgcagtgatattcagatgattttccaggatccgttggcatcgctaaacccgcgtatgaccatcggcgagatcatcgctgaaccactgcgtacttatcatccgaaaatgtcacgccaggaagttcgcgagcgcgtgaaggcgatgatgctgaaagtcgggttattgcctaacctgattaaccgctatccgcatgagttctccggtgggcagtgccagcgtatcgggattgctcgtgctcttattcttgaaccgaagctgattatctgcgatgagccggtttcggcgctggacgtgtcaattcaggcgcaggtggtcaacctgctccagcagctgcaacgtgagatgggattgtcattaatttttatcgctcatgacctggccgtggtaaaacacatttccgatcgtgtgttggtgatgtatctcggccatgcggtagaactggggacctatgatgaggtctaccacaatccactacatccttacaccagggcattgatgtcggcagtccccatacctgatccggatctggagaagaacaaaaccatccagttactggaaggggaattaccgtcgccgatcaacccgccttccggttgtgttttccgtacccgttgcccgattgccggtccggagtgcgccaaaacacgtcctgttctggaggggagtttcagacacgccgtttcttgcctgaaagtcgatccgctttaaacacaataagggctgacagttgtcagccctttttcacgccgaaagcgattatttattcccgccagatgatatggcaaagtttgtgatctttttcgcggcataacagaatgcgggcgaaaacatcgttgatttcaccatcttcactgtccgccagaccaatcaccacttcggcaaaaaagtctgggttcaaatcgaaatcaacatgttcctgccagtcttccgccggatcgaataactccgcgccgccgcgctcttcaaactgaagattgaacagcagaacatcagctggatcgagattgtcggcagccagttcgagaaaaatatcgtaggcctgctcaagcgtttcatcttcagtcaggcgattgtttagatccatatccatagtcactacctgtttaacctctgttggcgacgttttacagcaacggactgaagaagtaaaacagtcgctcggcgacacgttgccataatggacgttttagccataaacgggcatcgagcagacgtgaacgcgaaatataatcgtcctgaacggcggcaaggtctgcaccaaaacctttatcgtcgattgccagggtaatctcgaaattcagccacagactccgcatatcaaggttaacggtgccaaccagacttagttcgccatcgaccagcacgctcttggtatgcagtaacccgccttcaaactgataaattttaaccccagcagcaagcagttccgtaaagaatgcgcgactggcccagccgaccagcatcgagtcattttttcgcggaaggataatactgacatccaccccgcgctgcgccgccgtgcaaatcgcatgaagtaaatcatcgcttggcacaaagtagggcgtggtcatgatcaaatattcacgcgccgaataagccgcagtcaataatgcctggtgaatgagatcttccggaaagccggggccagaagcaattgtgtgaatggtgtgaccgctggcctgttcaaacggcataatattgacatctggtggtggcggcagaatacgttttccggtttcaatctcccagtcgcaggaataaataatccccatcgcggtggcgatggggccttccatacgcgccatcagatcaatccattgccctacgcccgcatcttgtttgaagtagcgaggatcgaccatattcatgctgccggtgtacgcgatgtaattatcgatcatgatcatcttgcgatgttggcgcaggtccatacggcgtaaaaacacacgcatcagattgacctttaaggcttcgaccacttcaataccggcattacgcattagctcgggccacgggctgcggaaaaaagccacactcccggcggagtcgagcatcaatcggcaatgaataccacgccgtgcagccgccattaatgattcagccacctggtccgccatgccgccgggctgccagatataaaacaccatctcaatattatggcgcgcgagctggatgtcgcggattaacgcctgcatcacatcatctgactcggtcatcagttgtagctgattccctttgaccccagcgatcccctgacgacgctcgcaaagcttgaataatggcgcagcgacactgctattttcttcggcgaagatatgcttacaggctttaaggtcgttaagccattttgcggtggaaggccacatcgctctggcgcgctcagcgcggcgtttgcctaaatggagctcgccaacggcaagataggcaataattccgactaacggcagaatgtaaataatcaacagccaggccatcgcggagggaactgcgcgtcgtttcattagaatgcgtaaagttacgcctgcaatgagcaaccagtatcccagaatggccaaccaactcaccaacgtataaacggttgtcatagattagaaatccttttgaaagcgcattgttatgagtttacgcatatggattcatctggcaaataaaaacgcgggaaaagcactggtcagcgtcgggggtgggggtataatgaccattctgttattgcatagagtagttaacatgaagcggagtagaacggaagtggggcgctggcgcatgcagcgtcaggctagccgacgtaaatcgcgttggcttgaggggcaatcgcgccgaaatatgcgtatccacagcatcaggaagtgcattctaaacaaacagcgtaactcgttattgtttgcgatctacaatatctaaatatactgggcaccattgcggtgcccaataagtttactctttcgtctttaaactctatttttgcgccgattctttactgtcagctttcgtttcttgttcatcgttatcgctgaaaataccatgacctgagttcaacaacattgaaacgagcatatcattattaatctcttcaccatttaaaactcgcgccagaatttcgctgccaaacagttgcggtgagagaatgatatccggatgtaccatcttaatcttattcaggtttttgctatcactgacggcgagaactgttttgacatcactgctcatatcttttgccgagagtacaacaaacgcgttatctgcatcgttatcactcagcgccagaatggcccggcaacgatcgattcccgctttctttaatactgaactgtcattactgtcaccggggataacatcagcgttatcgcctaagcgttgctcaagttgcttgatatcatcttcaggcaagttgctgataaccgttacgttttgtccgcgttgattcagttgcaggatcgtattgatggcgagaatcgaatgtccgcaaacaataaaatgatctttacgatgcattgtatgattgtttccttttacaagtttgttgaatcccccgcggataagcggaccaaaaattgaggtcatagatgtggcaaaaacggtaatgccggaaataatgaccgaaatagtgaacaatcgtgctgattcagaaacagggacaatatcgccatagccgacggttgacatggtttctatcgaaaaatagaacgcggtcatcaaactttctattcgcggattaaaaccttcgcttaaataaagcgcaccgtaggttgagtaaaacagtaatgtcgtgaaactaataaatgcaaaaattgtcccggctgcggcgctactgtgggagaagtctttgcgcagtatcagcaaaaacaccagcgtaaaaatgcaaaatccaatactaaatttcagccagggataaaaatgcagggtgtaaattagcgctatcaacaacaaaatgatactgattgcccatgcgagctttgcccggaacagtaagccaatggagttcaggacaagaaagacgccgagcataaatagtggggcgtttgccagcaaggagagatccaactctgaaaatgctttgatatggaaaatatcaagcaaattgaccgacataccatagattgttttaaaaataagcaatccatttaaaaagacggccagcgcgagaatgtcgtgccgaagggtcacccataaatttgttgctgtttgtttgaatgtagcccagtgactcactgatacctctgtaaccacaattttgtttaattatcttagcgtgcacattttctgaacatacatgcagcgcgtgaatgtgttaaacaatagtagatgactttatccgcagtaatcaaaggatttgagcgagcaactgtacctcaggaaaggtcatttttcctgaatatgctcacatcatataaagaaatacagataaagttattatctgcttgtggtagtgaatgcactgaccggctataaggaaaggccaaacaagaacacggttgcaaaaaccgtgcccttaaatattgaatctctattcagaacactttcttaaatggtttcactgaaacgtgttcatagactcctgccgctacgtacgggtcagcatcggcccaggcctgagctgcttccagcgattcaaattcagcaataacggttgagccagtaaatcccgcagcccctggatcgttactgtctaccgctggcattggaccagctgtcaacaaacgaccttcatcatgcagtaactgtaaacgtgctaaatgtgccggacgaacggaaaggcgtttttcgaggctatcagctttgtcttgagcgtaaataacatacaacacgggcacaactccttgttcgggaaagttgtaaagtacgttatttgaaagggcgaagatctgcaacggaaagatgatgtctttgttaagaccatgcataaattaaggtcaattacgccaaaaatgacattttcactgatcctgatcgtcttgccttattgaatatgattgctatttgcatttaaaatcgagatctggtttttctactgaaatgattatgacttcaatgacccttgatttacctcgccgcttcccctggccgacgttactttcggtctgcattcatggtgctgttgtggcgggtctgctctatacctcggtacatcaggttattgaactacctgcgcctgcgcagccaatttctgtcacgatggttgcgcctgctgatctcgaaccgccacaagccgttcagccgccaccggagccggtggtagagccagaaccggaacctgagccgatccccgaaccaccaaaagaagcaccggcggtcattgaaaagccgaagccgaaacctaagccaaaaccgaagccggtgaaaaaggtacaggagcagccaaaacgcgatgtcaaacccgtagagtcgcgtccggcatcaccgtttgaaaatacggcacccgcacgcctgacatcaagtacggcaacggctgcaaccagcaagccggttaccagtgtggcttcaggaccacgcgcattaagccgtaatcagccgcagtatccggcacgagcacaggcattgcgcattgaagggcaggttaaagttaaatttgacgtcacgccggatggtcgcgtggataacgtacaaatcctctcagccaagcctgcgaacatgtttgagcgtgaggtgaaaaatgcgatgcgcagatggcgttatgagccgggtaagccaggcagtgggattgtggtgaatatcctgtttaaaattaacggcaccaccgaaattcagtaagcagaaagtcaaaagcctccgaccggaggcttttgactattactcaacaggtaaggcgcgaggttttccttcaggatcaaccgcgacatacttaaataatgcttctgtcgctttatagcgttgcccgattggttcagacgctacttttttcacccacacttcaatattaatgctgaccgatgtcgtccctttctggacacagcgtgcatagcagcacaccacatcgccgaccgcaaccggccgtaagaaagtcattccttcaacccgcacagtcactacgcgaccgtgggcaatttctttcgccagaatagcgccgccaatatccatttgtgacattaaccaaccaccaaagatgtcaccattggcattggtatcggcgggcatggctaaagtacgtaaaacaagatcgccctgagggacgttatgtgttgtagacatggtaaaaccgacttaaaaggaaaatcacaggcgcgatgctactatgattttcctgaggagaacagaggagatacagcgccagccccgaaggactggcagtctggttaggatttatcttcctgcggcatgtggcggtagatatagataccgcttaacaatgtgaagattaaggtaagggcggtcaggccaaagactttaaagttgacccaaatattttgcggcagccagaatgcgatgtagatgtttgccagaccgcaaaggataaagaaaacagcccaagccagatttagcttcgaccataccggttgcggcagcgtgagttctttacccagcatccgctgaattagcggctttttcatcacccattggctgactaacagggctcccgcaaacagagcataaatgactgtaaccttccatttaataaactcatcattgtggaagaacagcgtcaagccaccgaagacgaccaccagaacaaaagtgatcagggccatcttctcaaccttacgaaagcgaacccagctatagataagcacaatcgccgtggcgacgatcagcgccgcagtagccgcatagatgtcataaatcttgtaaaacgcgaaaaagacaaccagcggtaaaaaatcaagaaactgcttcattttacgattccgtaatcaaatgcttaaggttattggcgaatcaacatatacaggcggaacagatagatgagcaatatggcagaaatcaggttgctcaaggtgttcgccagtacggcaccaatttccggggttaatgcggcaaaagaagaggcaaaaagcagcaacagtgtttttgccagcaaccagctcagtactgcgggtgccaccagacgcatattcgcccaagtcagccgcatactgctacgcatcgaggcaaaaatgcccattttgtcctgtaccagcatcaccggtgccagggccagtaaaatggccatgataattcccggaacgaccaccagcatgatgccaatctgtactaaaagggtagtcagaaaaatcagaataaataacttgggcaatatcggcgcactggcaccaatagctcgcagcgcactgactctctgacccgcagacaccagctggataattaatattacgcctccggcgagaatggcgttaccgattaatcctgaaaaagtggacgccgctgaagcctgcagcaaaatttgttgctgttccggtgacatattctgaaccaggtcgaacaacccactactgccgctaacgggcacgccgtcattgagctgcgcaagctgtgcatcactgggtgagaaaacatgccctaacaccactgtgataaacgcacatagcaacgataccaacagaatggtcataaattgattacggaagaaatttccggtgtcacggtatacggactgcgccgtgatagacatgcactctccttgagttttatgcaggtgttaattagcgggcaattgtaccctggttaagcctcgggtggcagcatcaggtcttgtatggaaaagcatatctttgtaaagcggaggtaattgctggccttcaggcgtgggcaaaccgcggcaagtggcgaacgagttaatatttgcgtagcgaaaatatttaaaaattgatttaaatcacgttaaccaggattctcaatgcaacttctaaattaatccagatcaataaatggtgaattatcatatgtaatgtgatctatgtaggatcatttgttactccaatgtaggtatattcgtcacgtttttataaccataacgacggagcggatatgaaaaagttaacagtggcggctttggcagtaacaactcttctctctggcagtgcctttgcgcatgaagcaggcgaattttttatgcgtgcaggttctgcaaccgtacgtccaacagaaggtgctggtggtacgttaggaagtctgggtggattcagcgtgaccaataacactcaactgggcctgacgtttacttatatggcgaccgacaacattggtgtggaattactggcagcgacgccgttccgccataaaatcggcacccgggcgaccggcgatattgcaaccgttcatcatctgccgccaacactgatggcgcagtggtattttggtgatgccagcagcaaattccgtccttacgttggggccggtattaactacaccaccttctttgataatggatttaacgatcatggcaaagaggcagggctttccgatctcagtctgaaagattcctggggagctgccgggcaggtgggggttgattatctgattaaccgtgactggttggttaacatgtcagtgtggtacatggatatcgataccacggctaagtacaaatctggtgttactaccgtaaaagactcggtacgactggatccgtgggtgtttatgttctccgcaggatatcgtttttaattttctctgcaaaacctctgcaaaacccctctgcaaaactggtcatcaaatgaccagttttttccattccttaccgcgtgcgtcgttgtaaatatcggtcattttttgattcgaatggcctagcaaaatattggtatcaaccccctgctctctgaacaatcgctctgataaagatctctgctcatggaaagagggaggggtgccattagcacgccagttgtaatccacagaatcccgggcttttttaaatgcaacggttaatgttgctggcttaaccatcccgccgcgcttagctgtccctttcgcgtgatggtggtgcaatagccacggactaagaacgcaatcgcggcaggatgacaccacatcatccagggtgagatttaatttatcgcaacgcagagccagagggatggcaatccgggttcctgttttttgctgttcgacatgaagataaccatcccggatatccgaaaattgcattttgcaaatatctgaaaggcgctggcctgtcgtcagtgccagcagcataccgcgctgtaaaaagtaaccatccttttccgctgcgttataaatcatcatccactcatcaaaagtcagtcgctgtcttgatatccgcacctgcggtttttttgccgattctgcagggttaaagcctggcgggacatcgcccgtttgctgagcttcccggaaaacatcgatcagtactttcctgaaaatttgtcccattctgttatgtcctctggccttgtactcttccagtactgataccacatcttttacggttatggcatctaaccgtctggtgccaaaacgttcatcaaataccctgagaggggccgctttctgtttcagcgtgttgagtttgatctcgccgttttcatatctttcctgttgaatttttctgtaattattcagaaaaatggtaacggttgatgaaccgccggtatcactaataattttctcctgcagactgagcatttgttccatttgctgccgggcaagacggctgttcgcttctgctgcaatagtttctgccagtttctggtcaatactgccgagaccgtgatttttgcctgttatgggatgcctgtaacgccagtaaactttgttatttcttttgtcaaaatacggagataatcccggaacatcggttttatattttcgcgggcgcgccatcttccagtatcctcttcaaagcagggtgatctgtggcgatcacctccggcttgtttaccattccgacaaagcgagcttgcggatccactcgccagcgtcttccaacttttttggggagaggaaatatcattccggctttagcgtatttacttaacgtactcggagtagggaccggttcactgaattcctcttttgcccactcagtgagcagaataagtcttgccatgggcgtcgttcgctaatcatggtcgccgccactatagctggtgggcaacgaccggggttgaacattaaaaatcagcctgactcgggatcagtttttgccagataactgaaacgtattttgcctggtaacgggcgtcatcaagtgcattatg

SEQ ID NO: 139 - DNA, 600 bp, Escherichia coli
  modified_base (5)..(14): a, c, t, g, unknown or other
  modified_base (16)..(22): a, c, t, g, unknown or other
  modified_base (184)..(184): a, c, t, g, unknown or other
  modified_base (188)..(190): a, c, t, g, unknown or other
  modified_base (195)..(196): a, c, t, g, unknown or other
  modified_base (199)..(201): a, c, t, g, unknown or other
  modified_base (218)..(220): a, c, t, g, unknown or other
  modified_base (234)..(234): a, c, t, g, unknown or other
  modified_base (245)..(246): a, c, t, g, unknown or other
  modified_base (369)..(369): a, c, t, g, unknown or other
  modified_base (381)..(381): a, c, t, g, unknown or other
  modified_base (408)..(408): a, c, t, g, unknown or other
attannnnnnnnnntnnnnnnncttttcgtccggaagcttcgcaaccggacccgcagacggctgaacaggattttttaatccggcaccctggcgcagttgtgtttagtgcgaaaaaacgccagtggggtagccaggaggatctggcgtgtgcgcagtggatctgggggcggatcgtgggtctcnacgnnnaggcnnccnnngatgatggcgagatcannngaccaaaagagccnaactggactgnntgggccaatgatgtgcgcacaatgcggatgctggatggcagaasycacagacaaatttgtgaaatgtttggkcgkstmcagcgggatycgttctgggtaaaaaacatcatgagyccgkcaaanctccgcgaaaantgggacgaactggtcatccgcctgggncgttcgcctgyrcagcgttgygtgaatcayatttctgaaccggacactgaaattccgccgggcttcagggggtaagtgttaatttctggtcatgaggtaattttcaggagggcttgtggcaaaagtttttacacaagaagagcgggagaaaattaaagggcaggttgttgaactcgtacgccagagtgggcg

SEQ ID NO: 140 - DNA, 592 bp, Escherichia coli
  modified_base (165)..(172): a, c, t, g, unknown or other
cgcaaatctcagggacgccctcttatmaaattggccaactccactacggaaaagaagagaaggagtgattttatggatcacctttctgattgatttcatattggcgaggtgacgtgagttaagtagaattgctgcgggtgcttgaggctatctgcctcgggcatnnnnnnnnaaggcagatagagaaaaaccccagttaacattacgcgtcctgcaagacgcctaacattaatctgaggccatatctatgctagacacatgtaggttagcctcttacgcgccgaaaggcaaggagaaggcaggctatgaagcagcaaaaaggcgatgctaatcgccctgatcgtcatctgtttaaccgtcatagtgacggcactggtaacgaggaaagacctctgcgaggtacgaatccgaaccggccagacggaggtcgctgtcttcacagcttacgaacctgaggagtaagagacccggcgagggagaaatccctcgccacctctgatgtgtcaggcatcctcaacgcacccgcacttaacccgcttcggcgggtttttswytttmtgtgkkkktgaatacgattggtattaggctatgc

SEQ ID NO: 141 - DNA, 493 bp, Escherichia coli
tggaggtaacgtgcgggtattacttcgacctgttctggtaccggaactcgggctggtgatcgttaagccgggccgtgaatccatgccggtattccacaatacccgggtactggtggagccggaaccgaaaagcatgcgtaatctgycgtccggggtcgttcctgccgttcgccagccgctggcggaggataaatcattactgccatttttcagcgacgaacgagtgattcgtgctgctggtggcgctggcgcattgtctgactggttactgcgccatgttaaatcctgccagtggccacacggcgattatcaccacagtgaaaccgtcattcaccgttatggtaccggcgcaatggtgttgtgctggcactgcgacaaccagctgcgcgaccagacctccgaatcactcgggcaacttgctcaccaaaacctgtttgcatggatgattgacgtcatacgccatgcaatgaatggctcgcaggaacgggaatta

SEQ ID NO: 142 - DNA, 204 bp, Escherichia coli
ggagcatcacaacgagcttcatgcggatcctctggcgttcgaagaaaagcatggttctcaggttgatttaatttttcgttttcttgatcacgcctttgcaactggcgtgcttgggtaaaagaggtgactgatgctcatagatttggttttaccttacccrccgacggtgaacacttactggcgacgccgtggcagcacatattt

SEQ ID NO: 143 - DNA, 330 bp, Escherichia coli
  modified_base (118)..(118): a, c, t, g, unknown or other
ggtatcagttagcgggagaaatttttaaatacttcacaattcaggcggttgactgttgtctggtttgcggggagtttgttaaaagaaactggcatggtgaatcccctgtgcggagggncaatcagcgagtaggtatatgggataatcgcggattcaggtgctggtactgaattcacccgggaggcacccggcaccatgcaatggcacatagcgccactctccagcccctctccggaggggctgtttatattgattttgtcagatgtgagtaaactccttatggactttgttgttttagcccataaggacatatttgcagagtgcaacggt

SEQ ID NO: 144 - DNA, 1871 bp, Escherichia coli
aatggcacatagcgccactctccagcccctctccggaggggctttcttgatggamaaaaaaagcccgcgctgggagacgcgggcggcaaggaataaacaataaaacgtgaagtaatatttcagctggcgaataataccccatagtaatcactctgcgcaactgcgcgacctttttcgaattgcgggctgtagtctcccttctgccattgtcctgtaacttccggacttcagcccgctccttattttactcacaatattatcccggccgggaggattcatggcatttaaacactatgatgttgtcagggcggcgtcgccgtcagaccttgcgraamgactgacacataaactgaaagagggctggcagccgtttggtagtccggtggccataaccccttataccctgatgcaggcgattgcagcagaaggtgatgtggtcgtcagtggtgcaactgagccggagtggtactacgtcatcgtactggccgggcagtccaatgccatggcttacggtgaagggcttccgcttccggattcatacgatgcgccccatccgcgcattaagcaactggcccgtcgtaacacagtgactcccggtggtgaagtatgcgtatttaacgacatcattcctgctgaccattgtctgcatgatgttcaggatatgagtacgattaaccatccccgggctgacctgagcaaagggcagtacggctgtgtcggccagggcttacatattgccaaaaaactgcttccgtatatccctaataatgcggggatcctgctggtaccatgctgtcgtggtggttcggcattcacccagggcacggaggggacattcagcgagtccacgggggccagtcaggattcggctcgctggggagtgggtaagccgttatatcaggatctgcttttccgcacgaaggcagcattgcagaaaaacccgaaaaacgttttgctggcgatatgctggatgcagggggaattcgatatgacgaatgccagttacgcccagcagccagcagcatttcttgcaatggtacagcagttccgtgctgaccttgccgggctggcagcgcagtgtcacggtggaagtccggcatcagtcccctggatttgtggcgacacgacatacgcgtggaaacaagaacacggtacgcaatatgaagtggtatatggtgcatataaaggtaaagaatcccagcagatttattttgttccctttatgaccgatggtagcggagttaatacaccgacaaacaacccgtcagaagatcctgatattgccgggtctggttattacggttcggcatcccgaacgaacaaaaactgggtatcatcaaatcgcccgacgcatttcagctcatgggcgcgtcgtggcattattcccgatcgtatggcaactgctattctgaacgtagccggkcgcacctyagccttcatyagtggtaaggcaccggaaatcaaaccctcgcccggcggcgacacgccatcggggccgtctgatggtgacacatccgttcgtacagtctccctgctgccgacagccggagaggctgctgcgcagggctggaccatcaccggcggcagtgttgcgctggaagatggtgtgtttaaggttaccaagcagagcaataaaacctggtccctgatgcatccggtggatgacgcagtctccctgctgacacggggtggcagactgagctgtaagtttcgactgtcaggcgcactgaccaacaatcagttcggtctgggaatttatctgtataccgatgtagcgttacctgacgtcgtggcgatgaccgggactggtaacccgttcctgatgtcgttcttcacccagaccacagacggcaaactgaatctgatgcatc

SEQ ID NO: 145 - DNA, 631 bp, Escherichia coli
  modified_base (624)..(624): a, c, t, g, unknown or other
  modified_base (626)..(626): a, c, t, g, unknown or other
tcacaagaaagccggaaacacaaagttgggcgagttcgggaattacagtaacgactggcagacgctggagctggtgttcaccgccggcagtgccacggttactccgaaactgaatggagtggctggcccggcattccaggtcataaaagacagtctgacactggggctgaatgcgctgacgctgacggatattaccaaaaatgcagcgtatggcgttgagatagaaagtctggtgctggagataaatgcaccggcatcatcataaaaagtgagccagtcaaatggaaggtatcgttaaactcaccggtagtgtyagtgggtcgtctgagatgcctgcatgagttatcagagccatcagtacttaactggtggctttttttattgttgtcagcttccggataacgggagacggggtatgtaccagatggaaaaaatcacaacaggtgtgtcatacaccacgtcagcggtgggaacgggctactggttcctgcagttgctggacagggtttccccgtctcagtgggcggcaataggcgtgctggggagtctgctgtttgggctgctgacatatctgactaacctgtatttcaaaatcagagaggaccgtcgtaaggctgcacgggnanagtaa

SEQ ID NO: 146 - DNA, 445 bp, Escherichia coli
  modified_base (104)..(104): a, c, t, g, unknown or other
gtggtgtgcttagtctggggctgaatcattaccgygataacgccattacctacaaagcccagcgcgacaaaaatgycagagaactgaagctggcgaacgyggcnattactgacatgcagaagcggcaacgtgatgtagcagaacttgacgccagatacacaaaggagcttgctgatgctaatgcgactatcgaaagtctccgtgctgatgtttctgctgggcgtaagcgcctgcaagtcgccgccacctgtgcaaagtcaacgaccggagccagcagcatgggcgatggagaaagcccaagacttacagcagatgctgaactcaattattaccgtctccgaagtggaatcgacaagataaccgcgcaggttaactacctgcaggagtacatcaggatgcaatgcctcgattaacagagccagctcaatcgctggccttttttatg

SEQ ID NO: 147 - DNA, 255 bp, Escherichia coli
  modified_base (17)..(17): a, c, t, g, unknown or other
cacagaatatatcaggnatccttgtccgtgtgccgttgacattacagcgtaaatatccggacatttcaccatcacaccttgatgtggtgaaaactgaaatcgcgaaagcctccaatgttgcagctaaggccggtgaaaacgtgggcgggtggatcgatgatttcagacgcgcagaaggcagctaatgcagccggtgcgatagctacagggcttttatctctcattattcctgttccactgacgacagttcagtgg

SEQ ID NO: 148 - DNA, 9363 bp, Escherichia coli
  modified_base (9358)..(9361): a, c, t, g, unknown or other
caggscttttatctctcattattcctgttccactgacgacagttcagtgggccaataaacattattaccttcctaaagagtcgtcttataccccggggcggtgggaaacactgccgtttcaggttgccatcatgaacagcatggggaatgaccggatccgcactgttaatctgattaaatctgcccgtgttggttatacaaagatgttgctgggagtggaggcttattttattgagcataaatcacgcaacagccttcttttccagcccacggattctgctgctgaagattttatgaaatctcatgtggaacccacgatcagggatgtgccggttttactcgatcttgcaccgtggtttgggcgtaaacatcgtgataataccctcacgctgaaacgtttttcatcgggcgtgggcttctggtgcctgggcggggctgccgctaaaaactaccgtgaaaaatccgtggacgtggtctgctatgacgaactttcctcgttcgaaccggatgtcgaaaaagagggttcgccaaccctgcttggggataaacgtattgagggctctgtatggccaaaatccattcgcggctcgacgcctaaaatcaaaggctcctgccagatcgaaaaagccgctaacgagtcggcacacttcatgcgtttttatgtgccctgcccacactgtggggaggagcagtatctgaaatttggcgatgaatccacgcctttggccttaaatgggagaaggacagccccgaaagygttttctacctctgtgaacatcatggctgcgtgatccatcagtctgagcttgaccagagcaacgggcggtggatctgtgaaaacacggggatgtggacccgtgacggtctgacgtttttcagcgccgcggataatgaaattccgccgccgcgctccatcactttccatatctggacggcgtacagtccgttcaccacctgggtacagattgtctatgactggctggatgcactgaaagatcccaacggcctgaaaacctttgtgaacaccacgctgggcgagacctgggaagaggccgtgggcgaaaaactcgatcaccaggtactgatggataaggtcgtgcattacacggcggcggtgccagcccgggtggtttatctgacggcgggcattgactcgcagcgaaaccgtttcgagatgtatgtctggggatgggctccgggagaggaagcttttctggtggataaaatcatcattatgggccgtcccgatgaggaagagacgctgttacgtgtggatgcggcgatcaacaaaaatactgccatgcagacggaaccgaaatgactatttcccgtgtctgctgggacatcgggggratcgatggcgaaatcgtttatcagaggtcaaaaaaacacggtgttttccgggtgctgccggtaaaaggcgcatctgtctatggcaagccggtgatcaccatgccgaaaacccgcaatcagcggggcgtgtatctgtgtgaagtggggacggacaccgcaaaagaaattctctatgcccgtatgaaagccgatcccacgcctgcggatgaagccacgtcgtatgccatccgttttcctgatgatccggagattttttcgcagacagaggcgcagcaactggtcgcggaagagcttgtggagaagtgggaaaaaggaaagatgcgtctgctgtgggataacaaaaagcggcgtaacgaagcgctggactgcctggtgtatgcctatgcggcattacgtgtgtccgtgcaacgctggcagcttgatctggctgtactggcaaaatcccgggaagaagagacgacccggccaacccttaaagaactggcagcgaagctgtccggaggagtgaatggttacagtcgctgaactacaggcgctgcgtcaggcgcgccttgatttattaaccggtaaacgggtggtgtctgtccagaaagatggtcgcagaattgaatatacggcggcttctctggatgagcttaaccgggcgatcaatgatgcggagtcggtactggggacaacccggcgtcgccgtcgtccgctgggagtgaggttatgaaacgaacgcctgtcctgattgatgtgaacggcgttccgcttcgtgatagtctcagctacaacgggggcggtgcaggatttggcgggcaaatggcggagtggttgccaccggcgcagagtgccgatgcagccctgctgcctgcgttgcgtctggggaatgcccgggcagatgatctggtgcgcaataacggaatagcggccaatgcggtggccctgcataaggatcacattgtcgggcatatgtttctgattagctaccgtccgaactggcgctggctggggatgcgggagaccgcggcaaaaagttttgtcgatgaggtggaggcggcctggtcagaatacgcagaagggatgtttggtgagatcgacgtggaagggaaacgcacgtttacggaatttatccgtgaaggtgtgggcgttcatgcgtttaacggcgaaatctttgtgcagccggtctgggatacggagagcacgcaactgtttcgtacgcgttttaaagccgtgagtccgaaacgggtggacacgccaggacacggtatcgggaaccgttttctgcgggccggtgtggaggttgatcgatatggccgtgccgttgcgtaccatatctgtgaggatgattttcctcgctccgggagtggacgatgggaacggatcccgcgtgaacttcccaccgggcgtccggccatgctgcatattttcgagccggtggaggacgggcagacccgtggggccaatcagttttacagcgtaatggaacggctgaagatgctcgattccctgcaggcaacacagcttcagtcggccatagtgaaggcgatgtatgcagcgacgattgaaagtgaccttgataccgaaaaggcctttgaatatatcgccggtgcgccgcaggggcagaaggataatccgcttattaatattctggataagttctccacctggtatgacacgaatagcgtgacgctgggcggtgtcaaaattccgcaccttttccccggtgatgatctgaaacttcagaccgcgcaggattcagacaatggattttcggcgcttgaacaggcgctgctgcggtatatcgccgccggtcttggcgtttcctacgaacagttgtcccgtgattactcgaaggtcagttattcaagtgcccgcgcatccgccaatgagtcgtggcgctattttatggggcggcgaaaatttattgcgtcccggctggccacgcagatgttttcctgctggctggaagaggcacttcttcgggggattattcgtccgccacgggcacgttttgatttttatcaggcgcgttcagcctggtcacgggctgagtggattggtgccggaagaatggccattgacgggctcaaggaggttcaggaatcggtgatgcgcattgaggccggactgagcacgtatgagaaagagctggcgctgatgggcgaggattatcaggacattttccgccagcaggtcagggaatctgcagagcgggaaaaagccggactctcacgtccggtgtggatagcgcaggcgtatcagcagcagatagcggagagtcgcaggccggaagaggagacaacaccacgtgagacgtaatctttcacacattattgcagcagcattcaatgaaccgctgcttctggagcccgcctatgcgcgggttttcttttgcgcgctcgggcgcgagatgggggcagcaagtctttcggtaccacaacagcaggtacagtttgatgctcccggaatgctggctgaaacggacgagtacatggccggaggtaaacgaccggcccgtgtttaccgggtggtgaacggtattgctgtactgccggtgacaggcacgctggtgcaccggctggggggtatgcggccattttccggaatgacaggctatgacggcattgtcgcctgtcttcagcaggcaatggcagatagccaggtgcggggcgtactgctggacattgacagtccgggcgggcaggccgccggcgcgtttgactgcgctgacatgatttaccgcctccgtcagcagaagccggtctgggcactgtgcaatgacacggcctgttctgcagccatgctgctggcgtcggcctgctccgacgactggttacccagacatcccgtatcggctccattggtgtgatgatgagccatgtcagctatgccggtaatctggcgcaggccggggtggatatcacgctgatttatgccggggcgcacaaggtggatggcaatcagtttgaagccttaccggcagaggtgcgtcaggacatgcagcagcgggttgatgcggcgcaccggatgtttgccgaaaaagtggcgatgtataccgggttgtctgtggatgcggtcacgggaacagaggccgccgtttttgaaggtcagtccggcattgaggccgggctggcggatgaattaatcaatgcgtcggatgccatcagtgtgatggccacggcgctgaacagtaatgtcagaggaggcactatgccgcaattaactgcaacggaagccgccgtgcaggagaaccagcgagtgatggggatcctgacatgccaggaagcgaaaggacgtgaacagcttgccacgatgctggcagggcaacagggcatgagcgttgaacaggcccgggcgattctggccgcggcggcaccgcagcagctggtggcatccgcgcagagtgaagccgatcgcattatggcgtgtgaagaagcgaacggtcgtgaacaactggcggcaacgctggcggcgatgccggagatgacggtggaaaaagcccgcccgatcctggcggctgcaccactggcggatgccgggccctcacttcgtgatcagatcatggccctggatgaggcaaaaggggcagaagcgcaggctgaaaaactggcggcctgcccgggaatgaccgtggagaacgcccgggctgtgctggctgcgggatcaggtaaggccgaaccggtctctgcatccacaaccgccctgtttgaacatttcatggcgaatcattcaccggcagcggtgcggggtggcgtgtcacagacgtcagcagacggtgatgcggacgtgaaaatgctcatggccatgccatgaagtcagtgctgaccatcaatatgaggttttaacaaaatggtgacgaaaaccatcactgaacagcgtgcggaagtacgtatttttgctggtaatgatccggctcataccgccacaggcagcagcgggatttcttctgcaacaccggctctgacgcccctgatgctggatgaagccaccgggaaactggtggtctgggatggacagaaagccggtagtgcggttggcatactggtactgccgcttgaaggcaccgagacggtgctgacctattacaagtcggggacctttgcgacggaggcaatccgctggcctgacagtgtggatgaacacaaaaaggcaaatgcctttgccggcacagccctgagtcacgcggctctgccgtaacacgttatcaggccaccatggtggcctgactgatttctgaatgaaaggaactgatttatgggattgtttacgacccgccagttactcggttataccgaacaaaaagttaaattccgtgcgctgtttctggagctgtttttccgccgtacggtgaatttccacaccgaagaggtgatgctggacaaaattaccggaaaaacgccggtggcggcctatgtctccccgatcgttgaaggaaaagtgcttcgccatcgcggtggtgaaacccgcgtgttacgtccgggctacgtcaagcccaaacacgaatttaattaccagcaggcggttgagcgccttcctggtgaagatccggctcagctgaacgacccggcctaccgtcgtctgcgtatcattaccgataacctcaaacaggaagagcacgctattgtccaggtggaagaaatgcaggcggtgaatgccgtgctgtatggcaaatacaccatggaaggggaacagtttgacacggtcgaggtggatttcggacgctctgaaggaaataacattgagcaggccgacggtaaaaaatggtctgagcaggaccgtgatacgtttgatccgacgcatgatattgacctttactgcgatcaggccagcggtcttgtgaatattgccattatggacggtacggtctggcgtctgctgaatggctttaagcttttccgcgaaaaaatggatacccgtcgcggttcaaattcacaactcgaaacggcagtgaaagatctgggcgcrgtggtgtctttcaaagggtattacggtgatctggccattgtggtggcgaaaacgtcttatgtggcagacgacggtaccgaaaaacgttatctgccggtgggcacactggtcctggggaatacggcagcagagggcattcgttgctatggtgccattcaggatgcgcaggcgttgtccgaaggtgtggtggcctcttcccgttatccgaaacactggctgacygtgggcgatccgtcctgtgaattcaccatgacgcagtccgcgccgctgatggtgctgccggatccggatgagtttgtggtggtacaggtgaaataatccgtgagcgggggcgaaatgcccccgtgtcttttttcacaggrrgctggagatggcaacaaaagaagaaaatctgaatcgtcttcgtcaacttgctggcctgctggggcgcgaggcggatatgtcggggagtgctgcggatattgcgcaacgtgtgtctgagtgggaagaggagcttgctgtttccccggagggcattatgcactctgatgagagcggggctgatcaaaatcacacagacgatggtgagcagttgaacaacacggatgctccggatgatgttaaagccgtccgggtacggaagtgcctgcaagtaatggggtattgcccggagacaggtcgtcccgttgagctggcgttacggggtatgcgtgttctggtgccatcatcactggcaacggccatgatacagcacggaacggctgaatatgcgtgattttcagaatgcctttgatgctgccctcgccggggtagacagtacgatcgttgaagtgatggggctctgtgcgcagttcacctcgggggcacagtgtggcagcgaagttcagggggtttttgacgatccggagtcgctggggtttgccggtggcggggtccgtattgaaggaagcagcccgtcattatttgtgcggacggatacggttcgtgccgtgcggcgtggtgacacgctgaccattaatggtgagacattctgggtggatcgtgtttctccggatgacgggggcagctgttatctctggctcaaccgtgggcaaccacccgcagttaaccggcgacgataaacgcagggtgaattatggcgataaaagggcttgatcaggcgattgacaatctgagccgggttcgtaaaaacgccattccggctgcttctgcaatgaccattaaccgcgtggccacaacggcgattaatcagtcttcgtcacaggttgcccgggaaaccarggttcgccggaaactggttaaggaacggtccagactgaaacgggcgacggtcagaaatccgaatgccagaattatcgttaaccgcggtgatctccctgtgattaagctggggatcagaatgctggggcgtcgtccgaacagcatactcaaagccggtcagcatcgttatcagcgggcatttatccagcgattaaataatgggcgctggcatgttatgcaacgtcttccccaggccagatatgaggagggcaatgacgacaagggaaggaaaaagcgtaatcgccttcccattcaggtggtgaaaatcccgatggcggccccactgaaacaggcatttgatgagaatgttgaccgtatccggcgtgaacgcctgcccggagaactggcatccgcgctgaaacaacaactgaggattgcgataaaacgatgaaacacactgatatccgtgctgcagtgctggatgcactcgagcagcatgaacacggggcgacgctgtttgatggtcgccccgttgtttttgacgaagaggattttcctgcgatcgcggtttatctgacggatgcagagtataccggtgaagagctggatgcagatacctggcgggccacactgcatattgaggtgtttttaccggcacaggtaccggattcagagcttgatcagtggatggaaagccggatttatccggcgatgactgcgatcccggcactggcaggactgattaccacgatggttacgcagggctatgagtatcgtcgtgatgacgatatggcgttatggagctctgcagatctgacttattccattacatacgagatgtgaggacgatatggcaacaccaaatccccttgagccggtaaaaggtgccggtaccactctgtgggtttacaacggcaagggtgatgcttatgcaaacccgttgtcagacgctgactggcagcgactggctaaggtgaaggatctgacgccgggcgagatgacggcagaatcctacgatgataactacctggatgatgaagacgcggactggaccgcgaccgggcaggggcagaaatctgcaggtgataccagttttacgctggcctggaaaccgggagaggaatgtcagaaaggcttataggctggtttgaaagcggcgatgtccgggcctataaaatccgttttccgaatggcacggtggatgtgtttcgtggctgggtcagcagtatcggtaaggccgtgacggcgaaagaagtgatcacccgcacggtgaaagtcactaacgtgggtaaaccttctgtagcggaagaacgcagcaaaattacgccggtcagtgcgattaaggtgacgccgacatccggtacggtggcaaaagggaaaacaaccaccctgacggtttcttttgagccggaaagtgcaaccgacaagacgttcagagcggtttccgccgatccgtcgaaagccaccattagtgtgaaagatatgacaattacggtaaacggcgtggcgacaggtaaggtgcagatccctgtggtgagcggaaatggtcagttcgccgcagtggctgaagtcaccgttactgaagcgggcgctgcagggtaaacggaggtaatacatgtttctgaaaacagaacaatttgaatataacggtatgtccgtcacgctttccgaattgtctgcgctgcagcggtatcgagcatcttgccctcctgaaacggcgtgcagaacaggcagaatcctgcggcaacctgcaggttagcgtggaagatctcgtcagaaccggcgcgtttctggtggcgatgtccctgtggcatannnntc

SEQ ID NO: 149 - DNA, 966 bp, Escherichia coli
  modified_base (953)..(953): a, c, t, g, unknown or other
  modified_base (964)..(964): a, c, t, g, unknown or other
cgtcaatgaatgaggccgtgatgaagatagagcaggaagtgctcaccacctggcctgccgatgccattgcccgggcggaagacgtggtgttgtgcctgtccgggatgatcgaagctgttcgtccggatactgatattactgaagtggcgaaaaataacacgctgactgatgatgatttttctgcgggaaagtcttcgacggcgagctgaactttgccctcagactggcgcgtgagatggggagacccgactggcgcgccatgcttgccgggatgacatccaccgaatatgccgactggcaccgtttttaccgcacgcattattttcaggatacccagctggatatgcatttttccgggctgacgtacgctgtactcagcctgttttttgcgatccggatatgcatccctctgatttcagtctgcttgtcccccggcatgaggaagagcaggtggagaggccggatgaggacaaaatgctgatgcagaaagcggcaggacttgccggaggcgtccggttcggtggggacggagggcgcgatatttyatcgtctgcggatgtggcggatgtcatggtggatgatgccgcattaatgatggcttcagcggggattccgggaggtgtgagatatgtcccagccggttggtgatcttgttattgacctgagtctggatgctgtccgtttcgatgagcagatgagccgggtaaggcgtcatttttcaggtctggataccgacgccagaaaaaccgccagtgctgttgaacagggcctgagccgccagggcgctggctgcacaaaaagccgggatttccgtcgggcagtataaagcggccatgcgaaccctgcccgcacagtttacggatatcgccacgcagcttgccggtggtcagaatccctggctgatcctgctgcaacagggcggtcaggtgaaggactccttcggcgggatgatncccatgttcangg

SEQ ID NO: 150 - DNA, 392 bp, Escherichia coli
  modified_base (7)..(7): a, c, t, g, unknown or other
  modified_base (11)..(14): a, c, t, g, unknown or other
gccgatngtcnnnntcacctcgctggcggtggcgacaggtgcgctggtgtacgcctggtaccagggagattccacgctttcagcgtttaataaaaccctggttctttccggtaatcagtccggactgactgccgatcgtatgctgactctctcaagagccgggcaggcagcagggctgacgtttaaccaggcgagagagtcactggcagccctggtgaatgccggtgtgcgtggtggtgaacagtttgatgccatcaaccagagtgtcgcgcgttttgcgtctgcatccggtgtggaggtggataaagtcgctgaagccttcgggaagctgaccactgacccgacgtcgggactgatggcgatggcgcgccagttccgtaacgtgacggcag

SEQ ID NO: 151 - DNA, 211 bp, Escherichia coli
  modified_base (41)..(41): a, c, t, g, unknown or other
  modified_base (204)..(204): a, c, t, g, unknown or other
acgaaaggctttgatgagcagacccgtcgcctgaaagaaancatgggaacactggagacctgggcggataaaacagggaaggcattcaaatcgatgtgggatgccattctggatatcggtcgtccggaatcctcagcggatatgctcgccagtgcgcagaaggcatttgatgaggcggataaaaatggcagtggtaccagagcnggagcca

SEQ ID NO: 152 - DNA, 486 bp, Escherichia coli
  modified_base (460)..(460): a, c, t, g, unknown or other
caacgctgcagtcggatatggaaaaagccggtgaactggcggcaagggacagggctgagcgtgagtcgtcacagctgaagtataccggagaggcgcagaaggcgtatgagcgcctgcagacgccgctggakaaatataccgcccggcaggaagagctgaataaggccctgaaagacgggaaaatcctgcaggcggattacaacacgctgatggcgtcggcaaaaaaggattatgaatcgacgctgaaaaagccgtcaggtgtgaaggtgtctgccggtgagcgccaggaagaccgggcgcatgcagccctgctggcgcttgaaaccgagctcaggacgctggaaaaacacagcggtgtgaatgagaaaatcagccagcagcgccgggatttatgggaagcggaaagtcagtatgtggtcctgaaagaggccgccacgaaacggcagttatctgagcaggnaaaatccctgctggcccatgagaaag

SEQ ID NO: 153 - DNA, 279 bp, Escherichia coli
tcgtgaggtgtaccggtgataatccgggctgcgctgggcgaagggcccacatcggcactgaagaacacctggtctgcggaggagcagcttcgtggaagctggatggccgggatgaagtccggctggggagagtgggcggaaagtgcgacggacagtttttcgcaggttaaaagtgtggccacgcagacctttgacggtattgcacagaatatggcggcgatgctgaccggcagcgaacagaactggcggggattcacccgttccgtgctgtccatgatg

SEQ ID NO: 154 - DNA, 994 bp, Escherichia coli
tcgcagtgtgaacaccgttggcaaatcggcattcgtggaggccgtcggtcgggcgagcgatgatgcggaaggttacctggattttttcaaaggagaaatcgggaaaacacatctggcccaggagttgtggacgcagattgataacggtcagcttgcgccggacctggctgaaatcaggacgtccattacgaatgtcagcaatgaaatcacgcagaccgtcaataaaaaactggaagaccagagtgcggcaatccagcagatacagaaagttcaggttgatacaaataataacctgaacagcatgtgggccgtgaaactgcagcagatgaaggacggacgcctttatattgcgggtatcggagccggtattgagaatacgccagcaggtatgcagagtcaggtgcttctggctgctgaccggattgcgatgattaatcctgcgaatggcaacacaaagccgatgtttgttggtcagggcgatcagatattcatgaacgacgtgttcctgaaacgcctgacggctccgaccattaccagcggcggtaatcctccggcattttccctgacaccggacgggcggctgacggcgaaaaatgccgatatcagcggtaacgtgaatgcgaactccgggacgctcaacaacgtcacgattaacgagaactgtcgggttctgggaaaattgtccgccaaccagattgaaggcgatctcgttaaaacagtgggcaaagctttcccccgggactcccgtgcaccggaacggtggccatcagggaccatcaccgtcagggtttatgacgatcagccgtttgaccggcagattgttattccggcggtggcattcagcggcgctaaacatgagcgggagaataacgatatttattcgtcatgccgcctgatagtacggaaaaacggtgctgaaatttataaccgtaccgcgctggataatacgctgatttacagtggtgttattgatatgccwgcyggtcacggtcac

SEQ ID NO: 155 - DNA, 1109 bp, Escherichia coli
  modified_base (570)..(586): a, c, t, g, unknown or other
  modified_base (591)..(591): a, c, t, g, unknown or other
  modified_base (595)..(597): a, c, t, g, unknown or other
gtccacgctgagcgcggggtatctccatgcctcgacgaacgttcccggtagtgatgatctgaacgggattaacgtgaaataccgttatgagtttacggacgcgctggggctgattacgtccttcagttatgccaatgctgaggatgagcaaaaaacgcgctacagcgatacccgctggcatgaagattccgtgcgtaaccgctggttcagcgtgatggcggggccgtctgtacgcgtgaatgaatggttcagcgcgtatkcgatggcgggtgtggcttacagccgtgtatcgactttctccggggattatctccgcgtaactgacaacaaggggaaaacgcacgatgtgctgaccggaagtgatgacggtcgccacagcaacacgtctctggcgtgggggctggcgtgcagtttaacccgaccgaatccgtgaccattgaccttgcttatgaaggttccggtagtggcgactggcgaacggatgcatttattgttggtatcggataccgtttctgacaacagacgccgatttatcttctgtaaatattgttatgatacgcaggttcatcnnnnnnnnnnnnnnnnntgcgnttgnnnaaacgtaaagttacactgtcctgaagcccgtggcgtcactgctgcgggctttttttattggtggaaaagtatgacagtaaaaatttctggcgtgcttaaagatggcacaggaaaaccagtacagaactgcaccattgtgctgaaggccagacgaaccagcagcacggtggtggtgaacacggtggcctctgaaaatccggatgaagccggacgttacagcatggatgttgagcatggccagtacagcgtcaccctgctggttgaaggttttccgccttcacatgccgggaccattaccgtctatgaaggttccagaccaggtacgctgaatgattttctcggtgccatgacggaggatgatgtccgaccggaggcactgcgccgctttgagcagatggtggaagaggtgtcacgtaacgcctccgcggttgcacagaacacggcagccgcgaagaagtcagccagcgatgccagcatatctgaccagtgaggcggcaacccatgcgactgat

SEQ ID NO: 156 - DNA, 1555 bp, Escherichia coli
tccgcagcgaagacatccgagacgaacgcgaaagcgtcggaaaccagcgcagaatcctcaaaaacggctgccgcatcgtccgccagttcggcggcgtcatcggcatcatcggcgtcagcttcaaaagatgaggcgaccagacaggcgtcagcagcgaagggcagcgccacgacagcatccacgaaggcgacagaggcagctggcagtgcgacggcggcagcwcagagcaaaagtacggcggaatccgcggcaacgcgcgccgagacagcggcaaacgggcagaggatattgcatccgccgtggcgcttgaggatgcgagcacgacgaaaaagggatagtacagctcagcagtgcaaccaacagcacatctgaaacgcttgccgcgacaccgaaggcagttaaagcagcgaatgacaatgcgaatggcagggtaccatctaaccgaaaagttaacgggaaagcactgactgcggatataacattaacaccgaaagatattggcactttaaattcagtaacgatctctttctctggcggggcagggtggttcaaactggcaacggttaccatgccacaagcgagttccatcgtttacatcgcattgattggtggcgctggatttaacgtgggggcacctcaacaggcaggtatatctgaactggttctacgagcaggcaatggaaaccccaaaggggttaccggagctttgtggaagcgtacagccgtcggattaacgaatttcgcctggatcaacacatccggcgatatatatgatatttacgttgagattggcaattatgcgacgagtgtaaatatccattgggattgtactacaaatgcgtcagtttctatttatacctcgctaacatattcagcgagtaagccttccagcgttaccgatggtgttgtttatacgatgtatagctcacatcagaaacctacaccatcagatattggagcgctgccaacaactggagggactatttcaggtccgttgtctgttactgatgggatcaccggggcactgaaggggaacgccgataccgcgacgaaacttgcggcagacccaaaaattaacggtgttaagtttgatggctcggcggatattaacctcacgccggaaaatattggtgcatttgcccgacgttcgacgggggcttatgcggattcggatggagccgttccctggaatgccgaatcaggcgcttacaatgtcacccgctctggcgacagctatattctggttaacttctataccggagtcggaagttgccggaccctgcagatgaaggcgcattacagaaatggtggtctgttctaccgttcttcaagagacggttatggttttgaggaagactgggcagaagtttatacctcgaaaaatcttccaccagaaagctacccagtcggtgcaccaatcccgtggccatcagataccgttccgtctggttatgccctgatgcaggggcagacttttgacaaatctgcatacccgaaacttgcagtcgcttatccgtcaggcgtgatccctgatatgcgtggctggactatcaag

SEQ ID NO: 157 - DNA, 833 bp, Escherichia coli
  modified_base (3)..(6): a, c, t, g, unknown or other
  modified_base (18)..(18): a, c, t, g, unknown or other
  modified_base (43)..(43): a, c, t, g, unknown or other
  modified_base (49)..(49): a, c, t, g, unknown or other
  modified_base (51)..(52): a, c, t, g, unknown or other
agnnnnttatccgtcagncgtgatccctgatatgcgtggctgnacgatnannggcaaacctgccagtggtcgggccgtattgtctcaggaacaggacggcattaaatcgcacacccacagcgccagcgcatccagtacggatttggggacgaaaaccacatcgtcgtttgattacggcactaaatccacgaataacaccggggcgcatacgcacagtctgagtggctctacggggtctgccggtgatcatactcatggtaatggtattcgttggccaggaggcggcggttctgcgttagcattttatgatggcggtgggttcacttatgtccatgattcacagtatcaagtaagcccggagacttcttcctatagatcgtattatcaacgtattcagacacagtcagcaggtgctcatacccactcgctgtctggtactgcagcaagttctggcgcacatgcacatactgtaggtattggtgcgcatacgcactccgttgcgattggttcacatggacacaccatcaccgttaacgctgctggtaacgcggaaaacaccgtcaaaaacatcgcatttaactatattgtgaggcttgcataatggcattcagaatgagtgaacaagcacggaccataaaaatttataatctgctggccggaactaatgaatttattggtgaaggtgacgcatatattccgcctcatacaggtctgccagcaaacagtaccgatattgcaccaccagatattcctgctggctttgtggctgttttcaacagtgatgaggcatcgtggcatctcgttgaagaccatcggggtaaaacggtttatga

SEQ ID NO: 158 - DNA, 298396 bp, Escherichia coli
  modified_base (35400)..(35400): a, c, t, g, unknown or other
  modified_base (98276)..(98276): a, c, t, g, unknown or other
gtggcatctcgttgaagaccatcgggtaaaacggtttatgacgtagcgtcaggggacgagttatttatttctgaactcggtccgttaccggaaaatgttacctggttatcgccggaaggggagtttcagaagtggaacggcacaacctgggtgaaagatgcagaagcagaaaaactgttccggatccgggaggcggaagaaacaaaaaacaacctgatgcaggtagccagtgagcatattgcgccgcttcaggatgctgcagatctggaaattgcaacggaggaagaaacctcattgctggaagcctggaaaaagtatcgggtgttgctgaaccgtgttgatacatcaactgcacctgatattgagtggcctgcaaatcctgtcagggagtaatcattgggattatgccgcagcacgtcttaagcaagaacgtgctgcggttggatgctattttttccctgaagcggaaaacattactacagtaccttgaaccttggttttaacattctcgaaatgctctgagagtatatgtgttaagccttcttcggaatcttttgtgtttgaaaagatgcctttctgattgtaaatgcgcatcagtttttgaccgaagctattgtgcacaactccatcgccaagaattgtggctccgtatagagttccatcgtcagttaaggcctgcgccgcattgcgtattacacagctttttgtagatatatttccaggcaggcagtgaagaaggtaaaacatggaaatggaatcaaattgaccatgtaacgccgcgggataaggttcaaaaacatcatggctaattttatgtttaatttttgattccccagccttgtagatgccgcgttcaggctagcttcgttcaaatccattaaagatatcagactactctcaggtacgtgagtaaggtaaaacccagttccaacaccaatatccagatggttgttacctacatgttccagaaagtgtggaagaaggtgttcctttgtaggacatccccatgcaagccgatttgatactcccaaaacccaccagtcataaagctttagggtaagtggtgtgtaaattttagccccatcatctgtgttttttttcattgatttcaccatgttatagttttatttgtgaattaaatcaattatggcgatgaattacaaggggttaaatgctgctgcagcatagcgatattgaaatagcctggtatgcttcgatacagcaggagccgaatggctggaagaccgtcaccacacagttctacatccaggaattcagtgagtatattgcgccactgcaggatgctgtagatctggaaatcgcaacggaggaagaaagatcgttgctggaggcatggaataaatatcgggtattgttgaatcgtgttgatacatcaactgtacctgatattgagtggcctgcaaatcctgtcagggagtaatcattgggattatgccgcagacacgtcgtatgcaggaacgtgctgcggttagtttgtgagctttcgatagtggttgttatttttgcccttatttgttccggaggccatggttcaatggtccgtctgccccctgtggtgatgtcagcaaaatcagccactgcgcgaaccacaatagcccgggaagatgctgaagatcaccaggtaaagctgtcagcgcagaaactggaagaactgctcgcatcaatggttaaggatgaggttgatcgcaatgatgggatttattgacgtcagcgagagcagaaggaagaactgaataacctgaatgatttacgctcaatcagagcgatgatgattggcagtaattagcggtcaatttcggtttttttggctgtgcgctccccgcccagcattgcgcgtcaattagccccaaaaaaacgaaaaagttacaatcaagtaaaaaattccttctgcaaaactaaaaaagatttcaataaaatcagacagttaaaagcataaaaaaaggtacaaaaaaacatctcaaagtcttgtttttttgcttcaaatacaattggttattgtgttttttgaaacctaccagtctggtacatggatatcgataccaccgccaattataagctaggcggtgcacagcaacacgatagcgtacgcctcgatccgtgggtgtttatgttctcagcaggatatcgtttttaattccacaaaaaaacgaccccgtaatatacggggtcaataaggacatggtataaagggtattatttcttcgcttctacgccatcagtttcagaacgaattaaaaatttctcagttgtttgcggaatatgctgaatcagccagtcggccatttgcttttcctcatttaaaatcgcttcgatgatcggaattgagactgtatcaccggcattttttgctgctgctaatagtgaggtgtaacaggcgatttcaaattgctcgaagacatatccgctaatagagcctttaactatttcatcagaagggaatataccaccgattgactgcccaagcgcagccattttactcatggaatctttaatgactgaacgtgaaatgtcattacgatcaagaatagtttccagttgaacaatctggtttttggtttcactaagatgttgttcaatacgagcgcgtagttcaggataattatctatacgactggccatggattcaagcatagattcggcttgcttttccattgcgtgggcgtcacgtaaccagtcatgataatgttcaatacgattcatgaaaatgtcctctttataaaatgactaaaagttaaaattcatatttcaggctttattttcggctttcttatttacgttattaagggccagatcagtcagtttgatgtcggtggccttttcttcttccagggtttctttcagaagcttcgctgctttacggtaacctaattgttcagccagcgtcgctaatgtcccgtaactggcaatctcataatgctcgactttctgtgctgcggcaatcagtgcggcatcacgcacttcgtttttctcggtactttcgatgacctcattagcttcttcaataagaccttccattgccacacatttcatgcgcttaattttcaggttcgattcggactccacaacttgatcaatacgttcaatctgtccatgagtttcctcgaggtgcgcatgaaaagcctgacttaatttttcatttgatgttgctcttgcgagttttgccagtgcccgggttaattgtttttctgcgctgtaggtatctgaaagcaggtgaataaatacatcttcaatggtcttcatattcatatttttctccagtgaaatcactgcgagccatacggcccgcagatgcaattatctttatcagctgatattaataattaacggtgaatcaggatttacctgatttattaccaccgctttgttgaccgccttttttacccgcttcagatgcgcgttgcggatcatttttaaaattaccgccgctatgctgaccgcctttacggcctgcgtcggatgccttctcacggtcttcggcgaaatttcctgaaccaccacgatgttcggccatgttatttctcccgttgcgttgcattgtttcattaatatgagtgttgtgtgtcgacactcattaaaattagtcgctaatgagaattagtcaaattaagcgcaacgagaagatagagggaaaatatattttgaggaacattctggatatattaacaattacctgaggaataagtgacttagagaaaattattgattttactggtgttatgttgcgggattaatttgtttgattatattactgttgggcggaaaaatgacgtaagttgacgttcgaccggggtaagcgaaacggtaaaaagataaatattaaatgaatttaggatttttccggcttcattaaagaaagttaaaatgccgccagcggaactggcggctgtgggattaactgcgcgtcgccgctttcatcggttgtacaaaaactttcagtgccaccagcattttctctggctcattaatatgttgctcgatgattttaacaatggccgaaccagaaatcgcgcccgcagctcctgcatcaatcgctgcttttacctgatccggggcggaaataccaaatccctgcaatggaggtgcagcgttgtactctttcagcttcgcaaccagatgattgaggggtaacgcggcgcggttttctgcgccggtcacgcctgctcgtgacagcaaataggtgtaaccacgaccgtaagaggctatctggcgcagcaggtcgtcatcggcatttggcgggcagatgaagataggtgcgacattatgacgcaacgcggcctggcggaagggcgcggactcttcaactggcacatcggcaaccagcaccgaatcgacgccgactttttcgcactgggcataaaactcatcaatgcctttgttaaacaccagattggcatacatcaacaggccaatgggaatggtcgggtgtttctggcgaatcagtgccagcatttcaaaacattgtgccggagtcacacctgccgcaaaagcgcgcagagtggcgttttgaatcgtcgggccatccgccagtgggtcggagaaggggatacctaactccagcgcgtcagcaccggcttcaattagcgtatcgataattttcaatgactgctcaatgcccggatcaccgagcgtgacgaaaggaacgaatgcgccttctttgcgctccttcaactgggcaaacagagattcgtagcgttccatcagatttcccctcgtgctttcaaaatatcgtgaacggtgaagatgtctttatcgccgcgaccggaaaggttaaccaccagtagctgctctttatccgggttttcgcgcatcattttcaacgcatgggccagggcgtgggaggattccagcgccgggatgatcccttcgtgcaggcacagcgttttgaaggcttcaagggcttcatcatcggtaatagacacgtaatcagcgcgtccagtgctgttaagatacgcgtgttgtgggccgacagacgggaaatccagtccggcggagatggagtaagattcttcaatctgcccgtcttcggtttgcatcatcggcgctttcataccgaaatagatacccacgcgaccatgttttagcggtgcgccgtgctcgccagtttcgataccgtgaccacctggctccacaccaatcaggccgacgttggtttcattgatgaaatcagcaaacatgccgatggcattcgaaccgccgccaacacaggcgataacggcatccggcaggcgaccttctctttccagaatctgcgctttggtttcttcgccaatcatccgctgaaactcacgcacaatggtcggataaggatgcgggccagctgcggtgcccagcatatagtgcgcggtttcgtaactaccggaccagtcgcgcagcgcctcgttacaggcatctttcagcgtcgcggaaccgctatgcaccgggatcacttccgcacccattaagcgcatacgaaaaacgttaggcgactggcgttcaacgtctttggcacccatataaatacggcatttcaggccgagcagggcgctggcaagggccgacgccacgccatgctgaccggcaccggtttcggcgatgatttcggttttacccatccgcttcgccagcaacgcctgccccagcacctggttagttttatgcgcgccgccgtgcagcaaatcttcacgcttgagatacagcgtggtgttcgtcccggctgtaatgttctggcatttggtcagcgcggttggacgcccggcatagtttttcagcaggtcgttgaactgagcctgaaattcaggatctttttgcgcactgacaaaagcttcttccagctggcgcagagcaggcatcaggatttgtggcacgtacatgccgccaaactcaccaaaataggggttaagtaatgttgtcattgttcctttccttaatatgcgcgcagcgtctggaaaaccgaggccaaaagacgtgcgtctttgatgcccggttgcgactctacagcagaattaaaatcaagtccggcgcagccggtttgtgccgcttccacgcagttatctgcgcctaagccccccgccagcagaacgttgccaagcgattgaccatttaatagtgaccagtcaaaacgttgcccgcttccaccctggccgttgtctaaaacatatttatcaacgtgctgaaactcgcgggcgggcagggtttcaccgacgcttaatgctttccagatggcaacatgtgctggcagagcttcacgcagcgtatcgatatacagctgttcttcattaccatgcagttgcactgccgccagcgataacaccttagctttgtccaccacatcggcaatatcgtgattgcggaacacgccaacatactgcaacggtgccgcagccatcacttcctgcgcctgttcaacgttgacgcaacgcggtgatgtcgcaacaaaaatcaacccaccgtaaatcgcgcccgcgtcataagctgctttagcatcttgcccacgcgtcaggccacatactttattctcacccagcaacacccggcgcacggcggcgtgcaaatcgtcatgggccatcaacgccgaaccaatcagaaaaccgttagcgaagtggcttaactcgcgcacctgagcgtaagtattgatgccggattcgctgattaccgtcacgttgtgccccagtttcggcgcaagctcgcgggtacggttgagatcaatcgacaaatcacgcagatcgcggttgttgatgccaacgacctttgcccccaatgcaatggcacgctccagttcctcttcattactgacttcggtcagcacacccatctccagactgtgggcgacggcggcaagctggcgatattgttcgtcatccagtactgaaagcattaataagcaggcatcggcctggtaatagcgcgccagatagatctggtaaggatcgataatgaagtctttacataaaatcggctgcggggcgatttggctgacgatggggaggaaatcaaagctcccctgaaaatatttctcatcagtcagcaccgaaattgccgaagcgtaatgtttataaatggcggcaatgcgtgctggatcgaaatcatcacggatcacgccttttgacggcgacgctttcttgcactccagaataaacgccgtgcgtgcaccctgtagcgcatcataaaaatgtcgcgtgctcggctgaacctcattctgaaaactggccagcggttgctgctgtttgcgggtttctacccaaatcgccttgtctgcgacgattttcgctaaaacggtttgcatcatttaccctcgtgccgccagcgcggtaactctgtcgtaagcggaaccactgcgcagtacctcaagaacggtttgcgcattggcttgcagatcttcatggccatgcaggcgcattaacatggcgacgttcgcagcgacggctgcttcatgggcggcgtcgcctttaccttgtaacaagcgtgttaaaatgtcacggttttcttccggtgttccgcctgccagttgctcctggtggtagggagtcaggccaaaatcttcagcggtcaattgatagctcttaatttcgccgtcatgcagctcggcaacgattgtcggcgcgtgtaatgaaacttcatccatcccgccgctgtgcaccaccgccgcgcgttgataccccagcacgcgcaaggtttcggcaatcggcagcaccagttccggactataaacaccaattaacgccagcggcggatgcgccgggttaatcaatggccccagcacattgaacagggtgcgggttttcagttgctggcgaaccggcatcgcgtggcggaatccggtgtgatacttcggcgcaaagaggaaacatacacctaactcatccagcgcctggcgcgatttatcggcgttcatatcaagattaataccgaacgctgccagcagatcggacgaaccagatttactggagacgctacggttgccgtgtttcgccactttcagcccacaggccgcggcgacaaacgcactggcggtagaaatattgatactgttgctgccgtcaccgccagtaccgacgatatcagcaaacagataatccgggcgcgggaacggcgcggcgttttccagtagcgcggttgctgctccggcgatctcgttcgggtgctcaccgcgaattttcatgctcaccagcgccgccgccagttgttccggcttcagctcgccacgcaccaccgctgaaaacagctggtggctttcttgttggctaagcgtctgcgcctgatacagtttttccagaatcggttgcagcgtgttggctggctctagtttctgctgcgcccaggccagcgtttgttccagcaggcgagcgccctgggtggtgagaatggattccggatggaactggaatccacaaacgcgatccgcatcgtgacgtactgccatcaccatgccattaaaatgggcgttgatggttaaaccggccggaatgttactgccaaccagcgagtgataacgcgccaccggcagcgggtttgttaatccggcaaacatcgcctgaccgtcatgttcaatgctcgacgctttaccgtgaagaatttcgcccgcctgaccgacatagcccccgtaagcttcgacaattgcctgatgtccgaggcaaatgccaataatgggcagcttgccacgcaagcgggtaaggagttccggcatacaaccggcttcgctcggcacaccggggccaggagaaagcatcagtaccggattgctcatggtcgccaggcgttcaattaaggtctgcgccggaatatggttgcggtaaatcaccacgttatgcccattgctgcgcaactgatctgccaggttgtacgtaaaagagtcgatattatcgagcagcagtatgtcagccatcagaaagtctcctgtgcatgatgcgcggtggcaatagcgcgcagtacagcgcgggctttattacgggtttcgtcggcttccgactgcggaatagaatcaaggactacgccagcaccggcttgcacggtggcgataccgttttccaccagcgccgagcggatcacaatgcaggtgtcgagatcgccatgcgcggtgaaataacctaccgcgccgccgtagctgccgcggcgacgaccttccgcctcggcaattaactgcatggcgcgtactttcggcgcaccgcttaacgtccccatattcatacaggcgcggtaagcgtgcagggcgtcgagatcgtggcgcagctcaccgaccacgcgggagaccaggtgcatcacgtaagagtaacggtcaactttggtaagatcggcgacgtagcggctgccgggggtgcaaatgcgtgccagatcattacgggcgagatccaccagcatcagatgttcagaaagctctttatgatcggtacgcatttccagttcaatacggctgtcgagatctctgtccagcgagccatcggcacgacgaccgcgtggacgtgttccggcaatcgggtagatctcaatctggcggctggtggcgtcatacttgagcgaactttccggcgacgcgccaaacagggtgaaatcattatcctgcataaaaaacatgtacgggctgggattactctttttcagcacgtaataggccgccagcggtgacgggcagggcagagagaaacggcgagatggcaccacctggaaaatttctccagcgcgaatcgctttttgcaacaaacgcactacgccaccgaactcttcatcgctctgattacattcacaacgcatatgcggcacggaaaccactggcagcggcggcgcggcttcggtcagttgctgacgtagttcgttcaggcgagcagtgagacgttgtttttcttcttcattcggagcaaacaggctggcctgaatacgggtgctttttttctgatggtcaatcaccatcagagtttcagcgagataaaaacagaaatcagggcagttattttccgctgacagttgcggtaaatcttcaaatcccgccacaaggtcataagagaacaggccgccgaagaacattgcttctcgttcttccttcggtacattcaacagattctgcaataaacggaaagcgtcaaaaaccgaaagggagcataagcgagcgtcttcatccagcagtggactgacaggggggaagcgcagcacacggcagtttggtgattgttcattttccacacccgcaggcagggcgttatccagtagtgtcagcagggcttcgccgttgccggaaagtgcctgaattgtgacagtgtcacctaatgctgtaatgcgcagcgcactgtctaccagtagcaggctttttaaatcatctttgctgtcgatatctgcggattccagcagcagcgttgccggacgatccccacacaactggtgaaaaagcgcggtgggattgtcgcgataagcgccttcgcaggttagcagttcgagagtcggtttttgtgtttgcattgttattctctaattttgttcaaaaaaaagcccgctcattaggcgggctgggtatctgattgctttacgcatggtgaatacactgcccgtttcaggaagtgcgccaccaagctttcagtacgaaaattgctttcattgtcgataccctttttacgtgaacttgcgtactagttaactagttcgatgattaattgtcaacagctcatttcagaatatttgccagaaccgttatgatgtcggcgcaaaaaacattatccagaacgggagtgcgccttgagcgacacgaattatgcagtgatttacgacctgcacagccataccacagcttccgatggctgcctgacgccagaagcattggtgcaccgtgcagtcgagatgcgcgtcggcaccctggcgatcaccgaccatgacaccacagctgcaatcgcgccagcaagagaggaaatttcacgttcgggactggcgttgaatcttattcccggcgtggaaatttccacggtctgggaaaatcatgaaattcatattgtcgggctgaatattgatattactcatccgctaatgtgtgagttcctcgcgcagcagacagaacggcgcaatcagcgggcgcagctgattgccgaaagacttgaaaaagcgcaaatacctggggcgctggaaggcgcacaacgactggcgcagggcggcgcagtgacgcgcggtcattttgcgcgtttccttgttgagtgcggcaaagccagttcaatggcggatgtctttaaaaagtatctggcgcgcgggaaaaccggatacgttccgccacagtggtgtacaatagaacaagctattgatgtcattcatcattctggcggtaaggcggtgctagctcatcctgggcggtacaatcttagtgctaaatggctgaaaagattggttgcgcattttgccgaacaccacggtgacgcgatggaagtcgcgcagtgccagcaatcgcccaatgaacgtacccagctggcggcccttgcgcgtcagcatcatttatgggcatcacaaggatctgattttcatcagccatgcccgtggatcgaactgggtcgtaaactctggctgcccgcaggcgttgaaggcgtctggcagctatgggaacagccgcagaacaccacagagagggaattatgagccagtttttttatattcatcctgataacccacagcaacgtctgatcaaccaggcggtggagatcgtgcgtaaaggcggggtgattgtttatccaactgattccggctatgcgctcggctgtaaaattgaagataaaaacgcgatggagcgtatttgtcgtattcgccagctgccggacggtcacaactttaccctgatgtgtcgcgatctttctgaactctcgacctattcatttgttgataacgttgcgtttcgtttaatgaaaaacaacacgccgggcaactataccttcatcttgaaggggacgaaggaagtgccacgccgtctgttgcaggaaaaacgcaaaaccatcggtatgcgtgtgccttctaacccgattgcgcaggcgttgcttgaagcactgggcgaaccgatgctttccacttcgctaatgctgccaggcagcgaatttaccgaatccgatcccgaagaaattaaagaccgtctggaaaaacaggtagatttgattattcacggcggctatctcgggcagaaaccgacaacggttattgatcttaccgatgatacgccggtcgtggtgcgtgaaggcgtaggtgatgtgaagcctttcttataagtgcgtaactctgtatactacgcggccttaaaatggcgctatacggcgccattgattctcctgttcgacgcctgtgaaggcgacactaaaaggaagctctatgagcgaaaaattacagaaagtgctggcccgcgctggccacggctcccgccgtgaaatcgaatctattattgaagccggtcgtgtgagtgttgatggcaaaattgctaaactcggcgatcgcgttgaagttacccctgggctgaaaattcgtatcgatggtcatctgatttcggtacgtgagtccgctgaacaaatttgtcgcgttctggcctattacaaaccggaaggtgagttgtgtacccgtaacgatccggaagggcgtccgacggtgtttgaccgtctgccaaagctgcgtggcgcacgctggattgccgtaggtcgtctggacgttaacacctgtggtctgctgctgttcaccaccgatggtgaactggcaaaccgtttaatgcatccaagccgtgaagttgaacgtgaatacgccgtgcgtgtatttggtcaggttgacgacgcgaaactgcgtgatttgagtcgtggcgtgcaactggaagatggtccggcagcttttaaaaccatcaagttcagcggcggcgaagggatcaaccagtggtacaacgtgactctgaccgaaggccgtaaccgtgaagttcgtcgtctgtgggaagcggttggtgtgcaggtgagccgcctgatccgtgttcgttacggtgatatcccactgccaaaaggtctgccacgcggtggctggacggagctggacctcgcccagactaactatctgcgcgaactggtggagctaccgccagaaaccagctctaaagtcgctgtagaaaaagaccgtcgtcgcatgaaggcgaatcagattcgtcgtgcggtgaaacgtcacagtcaggtgagcggcggtcgtcgttctggcgggcgtaataacggttaatcaaagtatgccggacgtcatatccggcatttttacagattaataatcaatccctatttgcgccttaacaccggcatcaaacgcatgtttgatggggcgcagctcacttaccgtatccgccagttcaagaatatcccgatgacagcctcgacccgtgataatcaccgtctgttgatgtggacgttcatttaacgcctgcaccacttcttccagtggcaaatagtcatacgccaccatatacgtcagttcatcaagcaaaaccatatccagtgaggaatcagcaagcatccgctttgcatgttgccagacttcgcggcaggcggcggtatcagactcgcggttttgtgtatcccaggtaaagcccgttgccatcacctgaaactcaacgccatgtggctccagcagattgcgttcgccattaggccaggtgcctttaataaactgcacgacgcccactttttttccgtgaccaactgcgcgtgttgccgtaccaaatgccgcggtggttttgccttttccattgccggtaaagacgatgataataccgcgttcatcctgggcctgggccacacgagcatctactttttctttcactcgctgctgacgctgttggtagcgttcatcactcattgggaaattcctggtttacggcccggttgggcgtcaaaggtcatgccggttttacggcggctgtcatcgcccatcagccagaggtagagcggcatgatatcagcgggtgttttaagtttctgtggatcttcggtcgggaaggcgcttgcgcgcattgcggtgcgcgtaccgcctgggttaatgcagttgacgcgcaggcgctgctgatattcatcggccagtacctgcatcatcccttcggtggcaaatttcgacgctgcatatgcaccccagttagctcgtccctgacgtccaacgcttgatgaagtaaagaccagtgaaccggcgtccgatttgagtaataaaggaagcagtgcctgggtgagcataaaggtggcattaacgttgacctgcatgacgtcctgccagacctgcggattttgttcgctcattgggcaaatatcgccgagcaatccggcattatgcaaaacaccatccagacgcggataattaacgacaatgcgctgtgccagttgttggcaatcttcggacgtgcaggtcagcaaatcgagaataaaccactgtggctgacgtccagtttcttcgtttatgtggctggctacctgacgtaatttttcttcattacggcccaacagaatcactgtcgcaccatagcgtgcatacgtcatcgcggcttcacggccaatcccatcgctggctcccgtcaccaggataatgcgatcattgagtaaatcttgttttggctggtaatgcatggctactcctcaacgacgttgtctgtcgcgctgccagtgtactttatgactttggggctttatgcctgaaacagaagggcatttcaatcagcctggggcgataacaccgcaaaatggatactttgtcatactttcgctgcaataacatctctgcgagacggcttaacatgcctgttgtaaactgtgagccaaagcgttgtttaaccaaggtggggactcgtggaattgttgtctgaatatggtttgtttttggcgaaaatcgttaccgttgtgctagcgattgcggcgattgccgccattattgtcaatgttgctcaacgtaataaacgccagcgtggcgagttacgggtcaacaatctcagcgaacagtataaggagatgaaagaagaactagccgcggcgctgatggactcacatcagcaaaaacagtggcacaaagcgcagaagaaaaagcacaagcaagaagcgaaagcagcaaaagcgaaagccaaactgggcgaggtggcaactgacagtaaacctcgcgtctgggtgctggattttaaaggcagcatggacgcccatgaagtgaactcgctacgtgaagagataacggctgtactcgcagcattcaaaccgcaggatcaggttgtgctacgtctggaaagccctggtggcatggtgcatggttacgggttggcggcttcgcagctgcagcgtctgcgtgataaaaacattcctttaactgttacggtagacaaagtcgctgccagcggcggttacatgatggcctgtgtggcggacaaaattgtttccgcaccgtttgctattgtgggttccattggggtggtggcgcaaatgcccaactttaaccgcttcctgaaaagcaaagatattgatatcgaactgcacactgccgggcagtataagcgtactctgacgttgctgggtgaaaataccgaagaagggcgggagaaattccgcgaagagttgaacgaaacgcatcagttgtttaaagattttgtgaagcgtatgcgtccgtctctggatattgaacaggtggcaacgggtgaacactggtacggacaacaggcggtagagaaaggcctggttgatgaaatcaacaccagtgatgaagttattcttagcctgatggaaggccgtgaagtggttaatgtacgctatatgcagcgtaaacgactcattgaccgattcaccggcagcgcggcagagagcgccgatcgattgttgctacgctggtggcagcggggtcaaaagccattgatgtaaaagacaaacgcgaggctaagacctcgcgttttgctttaatcaaccagatgatatttttctgaaagcacatgggccaggtgtttgaacatattaaacaccgcggtgcttttggctgttggcaatccttgttcatctaaaaagtagtcgccggtaaataccagcacgccattacgctgcgtgacgccggtggcttcaatccctgcgagcgtatcctcatgctcacgaatgattttgttggcctctttcaacagcgtttcgcggtcgatgggttgtgtctctttgttcattatttactccttaaacaaggacattagtctacgccaggcatggcttgcagacaaatataccacgctggtggcaagagcgccttactggtaactttggattttgcatgctaataaagttgcgtatcggattttatcaggtacagtgtgacgctttcgtcaatctggcaatagatttgcttgacattcgacccaaattccgtcgtgctatagcgcctgtaggccaagacctgttaactcagtcacctgaattttcgtgaacagagtcacgacaaggggttgatatccgcagagaacgagtccatatcggtaactcgttgccagtggaaggtttatcaacgtgcgacgcattcctggaagaatcaaattaggtaaggtgaatatgggtaaagctcttgtcatcgttgagtccccggcaaaagccaaaacgatcaacaagtatctgggtagtgactacgtggtgaaatccagcgtcggtcacatccgcgatttgccgaccagtggctcagctgccaaaaagagtgccgactctacctccaccaagacggctaaaaagcctaaaaaggatgaacgtggcgctctcgtcaaccgtatgggggttgacccgtggcacaattgggaggcgcactatgaagtgttgcctggtaaagagaaggtcgtctctgaactgaaacaactggctgaaaaagccgaccacatctatctcgcaaccgaccttgaccgcgaaggggaagccattgcatggcacctgcgggaagtgattgggggtgatgatgcgcgctatagccgagtggtgtttaacgaaattactaaaaacgcgatccgccaggcatttaataaaccgggtgagctgaatattgatcgtgttaatgcccagcaggcgcgtcgctttatggaccgcgtggtggggtatatggtttcgccgctgctatggaaaaagatcgctcgtggtctgtctgccggtcgtgtgcagtcggtggcggttcgcctggtggtcgagcgtgagcgtgaaattaaagcgttcgtgccggaagagttctgggaagtcgatgccagcacgaccacgccatctggtgaagcgttggcgttacaggtgactcatcagaacgacaaaccgttccgtccggtcaacaaagaacaaactcaggctgcggtaagtctgctggaaaaagcgcgctacagcgtgctggaacgtgaagacaaaccgacaaccagtaaacctggcgctccttttattacctctacgctgcaacaagctgccagcacccgtcttggatttggcgtgaaaaaaaccatgatgatggcgcagcgtttgtatgaagcaggctatatcacttacatgcgtaccgactccactaacctgagtcaggacgcggtaaatatggttcgcggttatatcagcgataattttggtaagaaatatctgccggaaagtccgaatcagtacgccagcaaagaaaactcacaggaagcgcacgaagcgattcgtccttctgacgtcaatgtgatggcggaatcgctgaaggatatggaagcagatgcgcagaaactgtaccagttaatctggcgtcagttcgtagcctgccagatgaccccagcgaaatatgactccacgacgctgaccgttggtgcgggcgatttccgcctgaaagcacgcggtcgtattttgcgttttgatggctggacaaaagtgatgcctgcgttgcgtaaaggcgatgaagatcgcatcttaccagcagttaataaaggcgatgctctgacgctcgttgaacttacaccagcccagcactttaccaagccgccagcccgtttcagtgaagcatcgctggttaaagagctggaaaaacgtggtatcggtcgtccgtctacctatgcgtcgatcatttcgaccattcaggatcgtggctacgtgcgagtagaaaatcgtcgtttctatgcggaaaaaatgggcgaaatcgtcaccgatcgccttgaagaaaatttccgcgagttaatgaactacgactttaccgcgcagatggaaaacagcctcgaccaggtggcaaatcacgaagcagagtggaaagctgtactggatcacttcttctcggatttcacccagcagttagataaagctgaaaaagatccggaagagggtggtatgcgcccgaaccagatggttctgaccagcattgactgcccgacttgtggtcgcaaaatggggattcgcacagcgagcaccggggtattccttggctgttctggctatgcgctgccgccgaaagagcgttgcaaaaccaccattaacctggtgccggaaaacgaagtgctgaacgtgctggaaggcgaagatgctgaaaccaacgcgctgcgcgcaaaacgtcgttgcccgaaatgcggcacggcgatggacagctatctcatcgatccgaaacgtaagttgcatgtctgtggtaataacccaacctgcgacggttacgagatcgaagagggcgaattccgcattaaaggttatgacggcccgatcgttgagtgtgaaaaatgtggctctgaaatgcacctgaaaatggggcgtttcggtaaatacatggcctgcaccaacgaagagtgtaaaaacacacgtaagattttacgtaacggcgaagtggcaccaccgaaagaagatccggtgccattacctgagctgccgtgcgaaaaatcagatgcttatttcgtgctgcgtgacggtgctgccggtgtgttcctggctgccaacactttcccgaaatcgcgtgaaacgcgtgcgccactggtggaagagctttatcgcttccgcgaccgtctgccggaaaaactgcgttatctggccgatgcgccacagcaggatccggaaggtaataagaccatggttcgctttagccgtaaaaccaaacagcaatatgtctcttcggaaaaagacggaaaggcgactggctggtcagcattttatgttgatggcaaatgggttgaaggaaaaaaataacctttaattctgtcaggtttttataaacaaagggtcgcgaaagcggcccttttttattgcatattattttttcttcaaacctatacactaaggctataaatgatatagtggttatagttagcaccttttttattattaaatcgtattagtcacccgccaggtgtgacgaaaaaacgatgttctgatggcgtctaagtggatggtttaacatgaaattacaacaacttcgctatattgttgaggtggtcaatcataacctgaatgtctcatcaacagcggaaggactttacacatcacaacccgggatcagtaaacaagtcagaatgctggaagacgagctaggcattcaaattttttcccgaagcggcaagcacctgacgcaggtaacgccagcaggacaagaaataattcgtatcgctcgcgaagtcctgtcgaaagtcgatgccataaaatcggttgccggtgagcacacctggccggataaaggctcgctgtatatcgccaccacgcatacccaggcacgctacgcgttaccaaacgttatcaaaggctttattgagcgttatccccgcgtttctttgcatatgcaccaggctcgccgacacaaattgctgatgccgtctctaaaggcaatgctgatttcgctatcgccacagaagcgctgcatctgtatgaagatttagtgatgttaccgtgctaccactggaatcgggctattgtagtcactccggatcacccgctggcaggcaaaaaagccattaccattgaagaactggcgcaatatccgttggtgacatataccttcggctttaccggacgttcagaactggatactgcctttaaccgcgcagggttaacgccgcgtatcgtcttcacggcaacggatgctgacgtcattaaaacttacgtccggttagggctgggggtaggggtcattgccagcatggcggtggatccggtcgccgatcccgaccttgtgcgtgttgatgctcacgatatcttcagccacagtacaaccaaaattggttttcgccgtagtactttcttgcgcagttatatgtatgatttcattcagcgttttgcaccgcatttaacgcgtgatgtcgttgatgcggctgtcgcattgcgctctaatgaagaaattgaggtcatgtttaaagatataaaactgccggaaaaataattttttgcgttattttcggcaccttttatgtagcgaaggtgccggaatatattctcttttgttacttatttctataccgtgcacaatatttttatccctcatatttatagggtaaattacctgtaaagtagtgtctaattacccgcctcgcaaactccagttttcaaatatctatttcaggtcaaaagattgaattattcactgagacgattcgtaaattcgctggatttttgactaaagtttctttaggatttgtctcatcgtatgattaattacaccaatcgttcaacgtcttgctgataagtgatggcgattatatgaggttagcaatgccttctggaaatcaggaaccccgccgcgatcctgaattaaaacgtaaagcctggctggcggtttttcttggttctgcacttttctgggtggttgtcgcactgctgatttggaaagtgtggggataactatggtcggtcaggagcaactggagtcgtcaccattatgccagcatagtgacaatgaaacagaaacgaaacgggaatgttccgtcgttattccagacgactggcaactaacatcgcagcagcaagcctttatagaactgtttgctgaagatgatcagccgaaacaataattatcatcattcttattacccatttttaatgaattaaagggcttttaatacaccgcagcaataacagcttgagttatctcaacacaaaataataaccgttaagggtgtagcctatgatcaacacaaatatgaaatattggtcctggatgggcgcgttttctctgtcgatgctcttctgggccgaactcctctggatcattactcactgatccttgaccccgctgcggcggggttgtcatttgctttgccacaaggtttctcctcttttatcaatttgggttgttatcaaatcgttacgcgatgtttgtgttatctttaatattcaccctgaagagaatcagggcttcgcaaccctgtcattaaggaggagctatgtcgtcaaccctacgagaagccagtaaggacacgttgcaggccaaagataaaacttaccactactacagcctgccgcttgctgctaaatcactgggcgatatcacccgtctacccaagtcactcaaagttttgctcgaaaacctgctgcgctggcaggatggtaactcggttaccgaagaggatatccacgcgctggcaggatggctgaaaaatgcccatgctgaccgtgaaattgcctaccgcccggcaagggtgctgatgcaggactttaccggcgtacctgccgttgttgatctggcggcaatgcgcgaagcggttaaacgcctcggcggcgatactgcaaaggttaacccgctctcaccggtcgacctggtcattgaccactcggtgaccgtcgatcgttttggtgatgatgaggcatttgaagaaaacgtacgcctggaaatggagcgcaaccacgaacgttatgtgttcctgaaatggggaaagcaagcgttcagtcggtttagcgtcgtgccgccaggcacaggcatttgccatcaggttaacctcgaatatctcggcaaagcagtgtggagtgaattgcaggacggtgaatggattgcttatccggatacactcgttggtactgactcgcacaccactatgatcaacggccttggcgtgctggggtggggcgtgggtgggatcgaagcagaagccgcaatgttaggccagccggtttccatgcttatcccggacgtagtgggctttaaacttaccggtaaattacgtgaaggtattaccgccacagacctggttctcactgttacccaaatgctgcgcaaacatggcgtggtggggaaattcgtcgaattttatggtgatggtctggattcactaccgctggcggatcgcgccaccattgccaatatgtcgccagaatatggtgccacctgtggcttcttcccaatcgatgctgtaaccctcgattacatgcgtttaagcgggcgcagcgaagatcaggttgagttggtcgaaaaatatgccaaagcgcagggcatgtggcgtaacccgggcgatgaaccgatttttaccagtacgttagaactggatatgaatgacgttgaagcgagcctggcagggccaaaacgcccacaggatcgcgttgcactgcccgatgtaccaaaagcatttgccgccagtaacgaactggaagtgaatgccacgcataaagatcgccagccggtcgattatgttatgaacggacatcagtatcagttacctgatggcgctgtggtcattgctgcgataacctcgtgcaccaacacctctaacccaagtgtgctgatggctgcaggcttgctggcgaaaaaagccgtaactcttggcctcaagcggcaaccgtgggtcaaagcgtcgctggcaccaggctcgaaagttgtttctgattatctggcaaaagcgaaattgacaccgtatctcgacgaactggggtttaaccttgtgggatacggttgtaccacctgtattggtaactctgggccgctgcccgatcctatcgaaacggcaatcaaaaaaggcgatttaaccgtcggtgcagtgctgtccggcaaccgtaactttgaaggccgtatccatccgctggttaaaaccaactggctggcctcgccgccgctggtggttgcctatgcgctggcgggaaatatgaatatcaacctggcttctgagcctatcggccatgatcgtaaaggcgatccggtatatctgaaagatatctggccatcggcacaagaaattgcccgtgcggtagaacaagtctccacagaaatgttccgcaaagagtacgcagaagtttttgaaggcacagcagagtggaaggaaattaacgtcacacgatccgatacctacggttggcaggaggactcaacctatattcgcttatcgcctttctttgatgaaatgcaggcaacaccagcaccagtggaagatattcacggtgcgcggatcctcgcaatgctgggggattcagtcaccactgaccatatctctccggcgggcagtattaagcccgacagcccagcgggtcgatatctacaaggtcggggtgttgagcgaaaagactttaactcctacggttcgcggcgtggtaaccatgaagtgatgatgcgcggcaccttcgccaatattcgcatccgtaatgaaatggtgcctggcgttgaagggggatgacgcggcatttacctgacagcgacgtagtctctatttatgatgctgcgatgcgctataagcaggaacaaacgccgctggcggtgattgccgggaaagagtatggatcaggctcaagccgtgactgggcggcaaaaggtcctcgtctgcttggaattcgtgtggtgattgccgaatcgtttgaacgaattcaccgttcgaatttaattggcatgggcatcctgccgctggaatttccgcaaggcgtaacgcgtaaaacgttaggactaaccggggaagagaagattgatattggcgatctgcaaaatctacaacccggtgcgacggttccggtgacgcttacgcgcgcggatggtagccaggaggtcgtaccctgccgttgtcgtatcgacaccgcgacggagttgacctactaccagaacgacggcattttgcattatgtcattcgtaatatgttgaagtaacaagtatttgcttgccggttattttgcttccggcaagcaaactaattacacaatgcaagagggttatttgttcagcaaatggcccattttctcggctttggtatcgagataatgttcgttattggggttacgacctacaatcaatggtacgcgttcaacaatattaatccctgcttcggtcagaatttcgacttttttcgggttattggttaacaagcggacttcattgacgccaaggagtttgaacatatcagcgcaaagagtgaagtcgcgctcatcagcggcgaagcctaactggtggttagcctctacggtatcgtaaccttgatcctgcagtgcgtaagcgcggattttattcagcagaccaatgttacgaccttcctgacggtgatacagcaaaataccacggccttcctcggcaatttgcgtcaatgccgcttcgagctggaagccacaatcgcagcgcaagctgaacagggcgtcaccggtcagacattcggaatggacgcgcgcaagtaccggggtatgcccggaaatatcgccatagactagcgcgacatgatcgtgtccggttgccagttcttcaaatcccaccatcaggaaatcgccccatggggttggcagtttggcttctgccacacgtttaagctgcatgaaattctccagataatgctggttctgtattggcttattttgccataacgagaaggggttcacctaatcacgacgcgtcgatcgttcacggaatggcacaaatctgtcaatttttcctggaactggcgttttcagttatgattgtgggacttatcaaaaaggagaggccatgcgttcgattgccagacgtaccgcagtgggagctgcactattgcttgtcatgccagtagccgtatggatttctggctggcgttggcaacctggagaacaaagttggctactaaaagcggctttttgggttactgaaactgtcacccagccctggggcgtcattacacatttgattttattcggctggtttctctggtgtctgcgttttcgcattaaggctgcctttgtattatttgccattctggcggccgcaatccttgtgggacaaggcgttaaatcctggatcaaagacaaagtccaggaaccacgaccttttgttatctggctggaaaaaacacatcatattccggttgatgagttctacactttaaagcgagcagaacgcggaaatctagtgaaagaacagttggctgaagagaaaaatatcccacaatatttgcgttcacactggcagaaagagacggggtttgcctttccttccggtcacacgatgtttgctgccagttgggcactgctggccgttggtttgctgtggccgcgtcggcgaacgttaaccattgctatcttgctggtctgggcaacgggagtcatgggaagccgcctgctgctcgggatgcattggccacgcgatctggtagtagctacgttgatttcgtgggcgctggtggcggtggcaacgtggcttgcgcaacgaatttgtgggccattaacaccacctgcggaagaaaatcgcgaaatagcgcaacgagaacaagaaagttaacgctggttgattttccgaatttagcccttaaatcatcaacaatgcgcgtggatgccatttcgcagacggcgcgaaaatggtactttaaagggctattgcggtaagttgaccataatttattcgctctaaccacataacgggaagtaatgtgaaatatttactcattttcttactggtgttagcgatcttcgtgatttcggtcacgttgggtgcgcagaacgatcaacaggtgacgtttaattatctgttagcgcaaggggagtaccgtatttccacattgctggcggtattgtttgctgcggggtttgctatcggttggttgatttgtggcctgttctggctgcgagttcgtgtttccctggcgcgcgctgaacgtaaaataaagcgactggaaaaccagctttcacccgcgactgacgtggctgtagtgccgcactcgtcagcggcgaaggaataactttctatgctggagttgttgtttctgcttttgcctgtagccgctgcctatggctggtatatgggccgcagaagtgcgcaacaaaacaagcaagatgaagccaaccgcttgtcgcgtgattacgtagcgggggttaacttcctgcttagtaatcaacaggataaagcggtagacctgtttctcgatatgcttaaagaggatacaggcaccgttgaagcccaccttacgctcggaaacctgttccgttcgcgtggcgaagttgatcgcgctattcgcatccatcagaccctaatggaaagcgcctcgctgacctatgaacagcgtctgttggcgattcaacaactagggcgtgattacatggccgccgggttatacgaccgcgcggaagacatgttcaatcagctgaccgatgaaactgacttccgcattggcgctctgcaacagttgctacaaatctaccaggctaccagtgagtggcagaaagcaattgatgttgccgaacgcctggtgaagctgggtaaagataaacagcgcgtcgaaattgcccatttctactgtgagttagccctgcagcatatggccagcgacgatctcgatcgtgccatgaccttgctaaaaaaaggggcggcggcagataaaaacagcgcccgcgtatccatcatgatgggacgcgtgtttatggcgaaaggagaatacgccaaagccgtcgaaagtttgcaacgcgtgatatcccaggacagagaactggtcagcgaaacgctggaaatgttgcaaacctgctatcagcagttgggtaaaactgccgaatgggcagaattcctgcaacgcgcggtggaagagaacaccggtgccgatgctgaattgatgcttgctgatatcatcgaagcgcgcgacggtagtgaggccgcacaggtctatattacgcgccagcttcagcgtcatccgaccatgcgtgtgttccataagttaatggattaccacttaaatgaagcggaagaagggcgtgccaaagagagcctgatggtgctgcgtgacatggttggcgaaaaggtacgtagtaagcctcgttatcgctgccagaaatgtggttttaccgcatacaccctctactggcattgtccgtcttgtcgggcctggtcaaccattaaaccgattcgcggtcttgatggcctgtaatttttaaaaaaatcctactttagttacaacatactagttattgatgttccattgtgctccggcaacgacggcgcagaaaaagcctgccaggggaaaaatcgcaactgttaattttttatttccacgggtagaatgctcgccgtttacctgtttcgcgccacttccggtgcccatcatcaagaaggtctggtcatgacgttaactgcttcatcttcttcccgcgctgttacgaattctcctgtggttgttgcccttgattatcataatcgtgatgacgcgctgtcctttgtcgacaagatcgacccacgcgattgtcgtctgaaggtcggcaaagagatgtttacattgtttgggccacagtttgtgcgcgaacttcaacagcgtggttttgatatctttcttgacctgaaattccacgatattcctaacactgcagcgcacgctgtcgctgctgcagctgacttaggcgtgtggatggtgaatgttcatgcctctggtggggcgcgtatgatgaccgcagcgcgtgaggcactggttccgtttggcaaagatgcaccgcttttgattgctgtgacagtgttgaccagcatggaagccagcgacctggtcgatcttggcatgacactgtcacctgcagattatgcagaacgtctggcggcactgacgcaaaaatgtggccttgatggtgtggtgtgttctgctcaggaagctgtgcgctttaaacaggtattcggtcaggagttcaaactggttacgccgggcattcgtccgcaggggagtgaagctggtgaccagcgccgcattatgacgccagaacaggcgttgtcggctggtgttgattatatggtgattggtcgcccggtaacgcaatcggtagatccagcgcagacgctgaaagcgatcaacgcctctttacagcggagtgcatgatgagtgattccaacagccgtctggtctactcaacggaaaccggacgtattgatgagcccaaagcggcccctgtacgccctaaaggcgacggtgtggtgcgtattcagcgtcagaccagtggacgtaaaggtaagggcgtttgcctgattaccggtgtcgatctcgatgatgccgaactgacaaaacttgcagcggaactgaagaaaaaatgcggctgcggcggagcagttaaagatggagttattgaaatccagggcgataagcgtgatttattaaaatcactacttgaagcgaaagggatgaaggtaaaactcgcaggcggttaacataaaaagccacggatatatccgtggctttcgaatattttactgtgcgtattattcagttatttcgtactgaacagaatcaagcgtattataattgcgagtcgataatcgacatttatttacgattatttaccgacctggtgaccaataacaccaccgacagctgcaccacctaatgtacccaacgtactgccatcggtcagtactgcaccgcctaatgcccctgcacccgcgccgattgcggtgttgcggtcccgtttagaccagttagaacaggcactcagagacattgccaaagtaattgccagaacagccgcggtcatttttttgctcgttacaaacataatactctctcctgaatttatgattcacggaagtaagctctctataactataatagctaagaataagcctggtgaaattattccgtgaaatctgctcgcgcgcaggattatatcacgcaggtgataatgacttcctgttatatcgctgataataattttatatcttaagcgtgttaataacaggtaaatagtcttaattatcaaccaggaatcatcttagagcggatgatttgccaaactgcaaatcatccgtagagaagggaaatggttaaatgtcaacgacgtgaacggtgagtttactgtgctcaagatgcatcagatcgctggcgcgtattttcgaatcggtaatcacgcgattgaatcgctcaacgggaccgatggagtatgaatgtacagcaccaaatttcgagctgtcagtcaggactatcgcttcgcactctttttccagcacggcattgaccacatcggtacgcatcatatcgcgaccggtgaatccagtttcaggttgccagccatcaataccaataaatgctttgctgaaatgtacctgctggatgcactggcgtgtcaaagggccaaccatactttcgctttttttctggtacacgccaccgagcaaaatgacttcacaaggcgcgtctttcagcaaatgcgcaatgtagctgctgactgtgatgatagtgacatttttcttctgttcgcccagagtccgggcgagcagggcattgctgctaccattttcgataaagatggtttcgcccggttgaaccagagacgcggcaaactcggcgagttcacgcttcagcgtatagttgctcatcatacgggtttcgacgtcatcactatcaagcgaaactgcaaagccatgtgcacggcggaggtaactcagtttttcgagggtgttgagatcctggcgaatggtaacttcagaaactccagtggcttttgccagatcggttacgctaacctgaccctggtcaatgaccatctgtagaatagtttgttgtcgggaattcatcgctgtaattcttataacgttataatactaaataaaaaaatactgacgcgccgggcatcctcaaataggaaaacctgaaggcacgattgttaaatctccacggtgccttcgggatgtctggcgtagattcagcaacctggcgcaagagttctgctttaagtatctcgagattatggatcgcagagtggtaatcgcctgccacaaggatatctaacacaatatcaatacgttcggcaacgcgctgggcatcaaattcagacatcaaggacatccttatagcaaaagtggaaaatgaataatgcaaaaattgccgctaaaagagaagtgtttaacagcaacggctaattatcatccaggaatacgatatataatgacgggatatagcgctaagtatatatattcatctacttatgcgcgcttcagatagcgtttataccagcgttcgaaggcgacggcgggcatcggtttggcaaacaaaaatccttgccgctcattgatcccgttcttggttaaaaaagcatcttcttttgcactctctacaccttcggcgatcacctgaagattcaatgcctgggccacagcgacgatcgcccggaccagtgactgcgagacaggttgtttgtgaatatctcgaacaaaaacctggtcaagtttgatggcatcgatcggaaagcgcgccagttgcgaaagtgaagagtagccggtaccaaaatcatccagatgcacttgcgcacctagttggctaaattgttgaataacagacagtgccagttcatcattctcaatcagacaactctctgtcagttcaacatctatagggcagtattcaaaattgagttcctggagaacctgtttcagggcggtgaaaatggtttgatcggcgagctgacgtgcagaaatatttaccgccactcgcaggttaatacctttatcccgccacttcgccacctggcgtacgacatcgagaatcacccaacggcctaaaggcacaattagccctgactcttcggcgtaggaaatgaagtccaacggtggaatcaacccacgttcaggtgactgccaacgtactagtgcttccagactgcgcacttcgccacgccaggtgattttcggttgatagtgaataaccaactgatcgttttccagtgctttacgcaagttggtatccagccagagatattcaaatacccgttgattcatttctggggtaaaaacgcaaaattgtcctcgtccgccttccttcgctgtgtacattgctgtgtcggcgtgacgaataatagccgtgctgtctgaaccatgttcgggagagagtgcaatacctactgaacagctggtataaacttcaattaaaccaatgcgaaaggggagccgtaagcgggtcaaaattcgtgatgccattgcttccagcgcgctttgtgaggtgttggatgccagtaccagaaactcatcgccacctggacgcgccaacacctggtcatgttcgagacagcttaaaatagccaatgacacgtcgcgtaataactggtcaccaaacaaatgcccataggcgtcgttgacctttttgaaattatccaaatcaagatacacaaccccaactttattgttatctgcatgattaatagcgtgatcgattaaatcctgcattgcgttacgattcggcagtccggtgatactgtcggtatttgccagaatacgcagtcgctcctgagcgcggcgctcttcggtaatgtcggtgccggaacagattaaaaaaatctcgtttttgccactgccgctgtggacaaatttattgcgaaacagaaacagccgctggcctttacgtgttggtatccacagttcgacttcatatgcattgccgcttcgaaaaaatacacggttattgcgcctggatgccgcagcttcacgacggctcataaacagtttaaacacgctttggccaatgacgtcgtgttctttcaacccagtgtaatcttcacataaccgattgaagcgttggatattcccccggctgtcgagaatcactattgcggaatgtgcttcagaaactacctgctcagcaaaggaaagcccgtgtgataaatcacgagcaactgccggtgtgtcatgccatgcagacgcgttgccagcccattcccgtttattgatttttcgtcctaccagatgcacagaaagatcgctctcatcgacggtcagactcatcatcaggctggaggtgatgaccgtcatttccctgatgcgagcagcctgttcggcagataactgcaaagtacgatcaggttctgtggtttcggtggtagaaaagcgcaaaacatcgctgctttccgtcaaccgccagtatggattgtgcgatccgagaaagttgtacaacgttgtggactccctaacggttttcatgatgcatatcctccggttaactgcggagtccgcggttaaataaaaggaacaacatgacttacatgaaattaacggcggctaaacgcattgttttttttatatatttatttgtaatccagttttggaaaaacgccagttttcaaacgaaagtcagttaaaaaatctgcctggatataacgaaggtagagcggggaaataaacggcccatccatgaggaatgggccgtgaaaggagattacgcgaccgggcgcgcaataatgctgcgggtttccatgcggacttcggcaatggtgacgtcaataacgtcagttactttgtaaaccgtttcacctttaatttgtacagtgccgttttcctggctgcaaaccagttcatcgcgcacagcgtgtaagaaaggtgccggaataaaggcgatagcgccgttatcaaccaaacgcacacgcatgccgccacggctgatatcgacaatttccgccgcgaaacgggtgtcggtcccggctttgtctttcaggaagcgtgcgtataaccagtcgccaacatcacgttctgccatccggttgagacggcgacgctcggccatttggacagtgatttcatcctgtgggcgcgtcgcagtttcgcctttgataaccgctttcagcagacggtggttgatcatgtcgccatatttacggatcggcgaagtccaggtggcgtatgcttccagaccgaggccaaagtgaggaccgggttcagtgctaatttcagcaaatgactggaagcgacgaatgcggctgtcgaggaaaccagttggttgcgcatccagttcacgacgcagtttgcagaaaccgtccagcgtgagcacttcttcggcatcgacatgcagaccgtgcgttttcagcaacgctgccagcgcgtcggcattcgccggatcaaagcccatatgcacgttatagatgccaaaaccgagcttatcgcgcagtacgcgggccgcacaaatgttagcggcaatcatcgcttcttcgacgatacggttggcaatgcgacgaggctcggcgacgatatccagcacttcacctttttcaccgagaataaagcggtaatccgggcgatctttaaacaccagtgcgtggttatgacgccactcgccgcggcgttggcaaatttgcgctagcaaacggacttgttcggcaattgcttcactttcaggctgccagtcaccggtattttccagccagtcagaaacctggtcatacaccagctttgctttggattcgatggtggcggcaaagaattcgatattatcttcaatggtgccatcagcggagagcgtcatgcggcatgccagtaccgggcggacttcattggcgcgcagtgagcagagatcgtcagaaagctcgcgaggcagcatagggatgttgaagccaggcagatagttggtgaatgcgcgaattttcgcggctttgtccagcttgctgccttcagcaatccacgcggttggatcggcaatcgccacaatcagctgaagtttgtcatccggcaacgccttagcgaaaagggcgtcatccatatcttctgtgctggcactgtcgatggtgacaaaatccagcgcggtcagatcttcacgaaccagaccttcatcgagcatttcggtagcgacgccgtctggtgcttctttttccagattatggcgcgcaagggtaacccaccacggtacaaagtggtcgtcaccaaaagtgatgtattgtgtcagttcagcatagaaagaacgatcgcctttcagcggatgacggcgcatttcggcaaccgcccagtcgccttctttaaactcgtggttcaggccacgggctgcgcggcaaggaatggcgtcttttaagagtggatgatcaggaacgatggccagacggtcatttttgccctgaactttacccacgaaacgagtcaggaacggttcaaccagttcttctggctctgcggattcacgttctttttcactgtggatcaccgcgataattcggtcgccatgcatgacttttttcatctgcggcggcggaatgaaataacttttttgcgcgtcgacttccaggaagccaaagcctttttctgtggcttttaccaccccttcagcgcgtggcgtctgggaatgcagttgctgtttaagctgcgctagcagcgggttgtcctgaaacataattgtctattttggtggccattagagcggctgacagttttacgcgaatctgtctgacgcggcaaggttaatatgtctcacccaacgcgatttttaagcgatttatccagccacacagcccgctccataccagcagattaataatctgcgttgatgatttttcgtgttcgagtaaagggctgaactgggcggcgctaaagcgatcgggtgctcgggtcagccattgtatcgcctgaacggtagcgtgctcaacagaatgacggtcagcccattggttaatttcattttcgcccttgcgcagaagggggctgatttttttatattcatttgatgaatccatacaggcggcaaaacaagcaggactgccatttatccgcgcgcataacaacgccgcaagcttattatccggctgtgtattaacccgtgtactgtttaacaacctttcgagaagggaaagtgaaatagggtggagagagagtgtttcggccagttggcaaagttctgctgttgaactttttgtgtactcttcaggtagtttttccacctcatagctgcttcgccagcgtattgattcatcagcaaacagtgacgcgtcggcgtagttttgtatttccagaccgggtaaccagcgtaccgggtgcccgagataagcctgaaatgtcgcaatggtccgcgcctgaaagccaataaaaccaatgatttggttaatgatcacacagtccccggcagtaagaccgacgtcattcagatgctggcgcgatcggttgtcgataatagaaggcgagctagccagttggcgggcatatcgcgtgatttgtgccaacctatgattgctttccctggaggaatcaggcccggggagcggcgtaagtcgcgccgaatagtagttacataaccgctggacgccgcaaacctgagcaaccgtcagggccgtagacaagcgttcataagcggtgaaggtctgtgaacgggtcacggtaagctggtcagggaacaattccactgcaagaacgcgcgcagggactagccatgnaaggaagggagccagcgtttcttcatcaaggatcacgtcgagcagaaagggatcgctgacctttgcggcttccgggaccagaggcagaacgtcatactccgcagtactggattgcgtttcatgataccagtggcttttgccggtgatgtggcgttgttccatgggcgctccttggtcgtaaaggaaatcgttatcctgacgcaaggcgggaaggggagaaagacggatcggcgataacaaatatcagaaaggtataacagagataacgggcggcagaacgccgcccaatatttaccaacagaatgattatttcaattcgagttcgttcattgcagcgatgctgaaaccgccgtcaacgtggaccacttcaccggagataccggcagagagatcggagcacaggaatgccgcggagttacccacatcttcaatagtaacggtacggcgaatcggggtaacggcttcgcaatgagccagcattttgcggaagtctttgataccggaggccgccagagtacggatcggaccagcagagatggcgttaacacgcacaccttccggacccatcgcgttcgccatatagcgcacgttcgcttccagagacgcttttgccagacccataacgttgtagttcgggatagcgcgctcagcgccaaggtaggaaagggtcagcagggcagaacccggattcagcatggagcggcaagcttttgccattgcaacgaagctgtaggagctgatgtcgtgggcaattttgaagccttcacgggtaacggcgttaacatagtcaccatccagctgatcgccaggtgcaaaaccaatagagtgtacgaaaccgtcaaatttcggccaaactttccccagttcagcgaacatggtgtcgatgctggcatcttctgcaacatcgcactgcagaacgatgtcagaacccaattgagcggcaaattcttctacgcggcctttcagtttgtcgttctggtaggtgaatgccagttcagctccttcgcggtgcatcgcctgagcgataccgtaggcgatggatagtttgctggcaacaccggttaccagaatgcgcttaccggaaagaaaacccatagctttaatccttattgttgatgcttgttgtgcctgaaaatcaggcgattcgtcgttttagtaaacagtacgaacagataaacggttattataatcaacctggctgtgagtggctatagctgccaggtccgaccggagcagggtgcgggcagggtgggcgcttttccccacaccctaatcctctccccagaggggcgaggggaccatattgtgcaaatattgtcaccccagcaacaaacaggcttatacagccccctaaccctttcagggcgatggctgggacggttcagaccttgccgaatattctccagcactgtctccatgttttcaccacaacagctattcggctcggtcggccccctcgccctttcagggtgagggtgaccggcggttcagttcctgcagaataatctccagcaccgcctcctcattacaatcaatctcgttatgccagaaacgcagcacggtccagctctgcgactcaagccagctagtgcgcctggtatcataggcaactgccaaatcatgctgcccaccatccagctcaacgactacgcgcgccgagcagcaagcaaaatcgagaatgtagctccccaccggatgttgacggcgaaatttgaaatcaccaaaacgtcggctgcgaagatatcgccagagctttcgttcctgcaaagtgagattgcgtcttaaatcacgcgcatttgattttattttatccatcacctcattctgacaagatttaatctcttgtcagaatgaggtggataatctggaaggaggattcagaaaattagcgatctttacgccacgcatccgctgtcaatgcttcgccaaagtgcccggcaatcagccgtttggtgagttcatgcagcggcgatgccagcacatccgcggtgctgcctcgctcgacaacctcgccctgatgcatcaccagcacctggtcgctaatgtgcttcatcattccgatatgctgggtaacataaatatacgaaatgccctgtttttcctgtaattccagcatcagattaatcaactgcgaacgcatcgacatatccagtgaagcgagggcttcatcggcaataatgacttttgggcgcaatatcagcgcgcgcgccagacccagacgctgtttttgcccgggggccaacatatgcggatagtaactgacgtgatccggtagcagcccaaccatacgcatcgtttcaataatctgtttgcgacgctgttccggttccaggttggtgttcaggcgcagtggaaaatccagaatttgcgagatacgttgacggggattcaacgaggtcgaaggatcctgaaaaatcatgcgaatacgctgactgcggaaggaataatcgccaaaatgcagtggatgatcgtcaatcaataactcgccgctggtaggttctatcattcccgccagcatttttgccagcgtggatttacccgaaccattctcgccaataatcgccagtgtctggccttcacgtagcgtaaagctcaagggttttaccgcttctacggtctgacgacgaaaccaaccggtccggtagcggaacgttttacttaaattacgcacttcaagcagcgtttcgatcatctcactctttctccatgttcagcgggaaatgacaggcatagagatgatttttcgcccccgtcaaacgtggcgtcacaatgcattctcgttgtgcgtacgggcaacgcggccccagacgacaaccaatcggtaactgttccagcagtgggatagcgccgggcagcgtattgaggcgacttttatgcggcatcgcgctaccgaagtctggtatcgcccggatcagcgcctgggtataaggatgatgtggcattgtcaccaactccttacttggcgcggtttccaccgtttgaccgcagtaaagcacgttaattttatccgcccattggctaagcatttgtaagtcatggctgataagcaaaatagtggtattgctgttttggttgagacgcgtcaacaggcgaaagatttgcgcctgggttgttggctccattgagttggtcggttcgtcagcaattagcagacgcggttgattcgccagtgcaatggctatcatcactttttgacattcaccttcggttaactcatagggaaaactgcgcatagcatctttgtgatctttaatccccacgcggtgcagtagttcgatggcacggcgtttgcgccagccaaaacgctgccaccaacggcctttataggtccaggctgggatgttttgcatcaactggcgacccacacgttctgaagggtcaagacacgactgcggttcctggaaaatcatcgacacgttatggccaaccagtttgcgccgttcgcgtgcggagagacgcagcaaatcgatatcatcaaaacgcatacggtcagcagtaacacgccagttatctttattcaccccacaaatcgctttcgcaatcaaactcttgccggaaccggattcaccaacaagaccgcggatttcaccttcggttaaggtcatacttacccggtcaacggctttaacccactcatccccggttttaaattcaatagtcaggttacgaatatcgagtaatggcattattccacccccgcaataatcgcacgacgaacgccatcgccaaggaggttaaccaacagcacgctaatcataattgccgcacctggcagcatgacagtccacggggcgacataaatcagttccagcgcatcaccgagcatcgctccccattcaggcgaggggagttgtgcgccgagatcgagaaagcccagcgcggcgatatcgagaattgccatcgacagtgcgcgggtgatctccgtgaccagcccggcggtgatgttaggcatcacagcaaaccagagaatattcagcgttgatgcgccatccagacgggcggcgataacgtactctttttccagttcgtcatgcaccatgctgtaaatcgaacgtaccatacgcggcagcagcgccagccagacggcaaacatggcgtgagacaaactcggtccggcaaacgctacaacgataattgccagcagcagcgaagggatcgccagtaaggtatccagaatatggttaagcaccgctgagcggaggccgtgcgtcgccccggcgaaggtgcccagtaccaggccacagatcgtcgcggcaagcgtcaccacaaatgcgccacccacggttggcgcagctccgctcagtaaacgacttaaaacatcgcgtccgaggtcgtcagtccccaggaagaaagaaacttcgccatagcgcgaccatgacggcggcaataattggtaaccgagaaattgctggtcgatgccgtaaggcgcaaaccagccgccaaaaatacacagtacagccagccccgcgcagccgtacaggccgaccatcgcagaggcgtcactataaaatttgcgccaggcggtacgcagcgtgcccggcgggcgcttttcgctgtatacgctatcgtaaggcataccattccttatgtttcagagggttagccatggcacccaaaatatcagaaatcacgttaacaataatgaccagtgagccacacaccatcactccggcggaaatggctgcgtaatcctgctggcggatggcgttaattaaccagcgccctaaacccggccagctaaaaaccatttcggtgatcatcgccagcgtcagcatggtggaaaactgtaagcccaggcgaggaataaccggcggtaacgcgttatgcagaacgtggcgacgcaaaatagtaaagcgcgacaaaccgcgggtcgccgccgcttttacatagttctggtcatacacttcgatagtgctgatacgcatcaggcggatcacttcagttgttggcgcaaccgacagggtgatcacgggcaatatcatatggcggattgcgctcatgatcatttcatcccgccatggtgagtccgaaagccaggcatcaatcaacgcaaaaccggtaatcggtttcacttcgtagagcagatcgaaacgccctgaaacgggcaaccaacctagcgtgagtgaacaaaacagcgtcaacagaagcgccagccagaacaccgggattgaaaagcccagcaaggcgatggcgttgatcaagttatcctgccacttatggcgcgtaatcccggcaatcatccccacggggatgccaacaatcagcgcaaaaccgaaggcgaggatgcacagttccatcgtcgccgggaagacctcttttaactgttcggcaattggttgaccgttaatgctggaaacaccaaaatcccagtggatcaggccattaaaccagaacacccaggcattccacagtgacgcgccttgtaacggcgcgtgtggagtgaaatagctcaaactgaagccaacgaaggtcagcaggaacaaggtaacaatcaataacaaaatgcggcgtaaggtgaagataatcatggctttttcacctcatcctgtttctcgcgatacaccccagcaaaggaggcgttaccaaacgggctaagtaccagacctttgatatcgtaccgataggcctgcaaacgcaatgacgacgccagcggcaaaatgggcaattcctgcgccagaatactttgcgcttcgtcataggcttcaatacgcgccgccagctgctgcgaagagagcgccttacgcaatacgctgtcgaatttcggatcgcaccagtgggcgaggttggtctgcgaatgaattgccgcgcagctcagtaacggacggaagaaactgtccgggtcgttactgtccgtcgcccaaccggataacgtcagatcatggctcatatccatcaaccgcgcctcctgaaagcgaccttctaccggcacaatcaccacttttacgccaacctgcgccatatccgcctgaatcagttcggcagttttcagtggactggggttccacgcctgcgaacgtgtgggcacccacagtttcagcgttaaattttccagccccaacgacttcaactgttcgcgcgatttcgccggattgtattcagtaattttagcctcgttgtcataggcccacgaggcgcgcggtaaaatagaggccgccgtttcagccgtaccataatagatggattgcatcaggcgctggttattaatcgccagtgccagcgcatggcggacagcgggattatttagcggcggtttggcggtgttaaatgccagataggcgacgttcatcccaggacgcagcgttaaacgcaagcgcgggtcgtcacgcaaaatggatagctggctggcagcaggccaggccagaacgtcgcattccccggtcaggagtttcgacaaacgtccggtgccgccggagcctaaatccaccactacctgcggcattaacggtttaccgcgccagaagtcatcatgacgttgtaggcgaataaattgcccggcgcggtattccgacaactgatacggaccggtgccgaccggttgacggtcgagttgctcctggcgatcttctttctctaacttccgggcatattctgccgacatgaccgaagcataatgggttgcgaggtgccacaaaaaagaagcatccggctgggcgagtcggaactcaacggtatgattatccagtttgcggacgcttttcacgttatcggcaaattgcaggctgtcgaagtaggggaagttgctgccgttgacgttatgccacgggttgttgcggtcaaaaattcgctggaaggtaaacaccacatcgtcggcattcattttacgagtgggagtaaaccagtcggttttttgaaacggaacatcgcgacgcaggtggaagcgataggtcgcgccgttgtcgagtacttcccagctttcggcaagttccggcatcaggcgataggtatagggatcgacatccagcagtcgatcataaaactgggcggcaagggtatcgacaattaacccactgctcgctttggatgggttaaaggtgttgacttgcccgctgacgcaatagacaaaaccgctgtcgcggatatcagcatgcgggggagattcaggcgcggcgattgcctgaccactcacaagtccagcaatcaccaaaagagacgataatacctggcgcataatattaagggattttatgtaaagaggctatcttactaatatttaatgacatttgccattaccgtttgtgttcaggggtcgtaatgagggccgtgtggttggtcgttgaacagatggcgtcgccatctgttcaacattcgtacccgtgatttctctataactataactcacagaacaacttagcgaggagcagagcggtacgatcgtgagaaacccattaaagcacgctgcaatgcgtgtcattttaaccggatgcagagtgaacgctttatccggacaacgatactgaccgatcgtctgcaattaaataattactcattaccccattgattcaaaaactctgcgatctcatcaatgcgtacgggattaatccccgcttcagcagccatttcatgttgggcttcttcgctgatctcttcattgttcatcaaacgggtgagcagtaactggaagtagtgggccagcggtgtgcgttcagcgtctgcgacaggctctgcgcattcggtcgcgtactcatcggcaatatcaaaatattttagcgggatatcgtggttcattatttgcccctggggttaatgcgctaagcataagggcggatgatagcactcgtgatccgggtcatacatctttttatagttaatggcgcggcgcgttaccctcaggcaggataatgcgccgcgcatccgactattacgtttcactcaccggcgttctgtcaccatcatacaacggcactttgcgatagcggcggatcagataccataaatatgcgccgcctaacgaagcccataccagaccgagtgtcagtgacgttgactcgaggttaacccacagcacacccaccgtcagcgcgccaaccagcggcatcagcaaatagtggaagtgatccttccagcttttattcattcctttacgccgccagaaatgattaaacaccgacagattcacgaaggtaaacgccaccagagcaccgaagttaattaacgctgtggcggtaactaaatcgaagaacagcgccgacaacgcgacaatcccgaccataatgacgttgagtgccggagtccgccattttgggtgcacatagccaaacacgcgctccggaaacacattgtcacgccccatcacatacagcagacgcgacacgctggcatgtgaagccaggccagaggctaacgtgttcacaaacgtggtgcagaggaaaatcgactggaagagcttgccgccgacgtacagcgcaatttcaggcagtgcggcgtccgggtctttaaagcggctgatatcgggaaagaacagctgcataaagaacgacgccgcgataaagataacgccgccgtataccgccgtcaggaagatggctttcgggatcacgcgtgcggcgtccggcgtctcttccgaaagcgtggtcaccgcatcgaaaccgaggaacgagaaacagacaatcgtcgccccggtaataatcgggatcaggtgcgcgttctcgctgataaacggctgaagtgaccagacggtgccaacgccttctcctttatgcagtccctgaactaccaggaagataaacaccaccatgatggagatttgcaccagtacaaacagggtattgaagttagcgaccaggttgacgctcttcagattcgcggcggttaaaatggcgacgaaggttaccacccacacccacggcggcacttccgggaagagggcggagagatagattttcgccaacaaaacgttgatcattggcaaaaagagataatccagcagtgatgaccagccgaccataaatccgacgtgcggattaatcgacttttgcgcgtaggtataggccgaaccggcctccggaaactggcgaaccagtttgccgtagctgatagcggtaaacagcacgcccgccagcgccagcaaataggacgccggaacgtgaccgtcgctaatgccggagacaataccaaaagtatcaaatacggtcatcggcgtgagataggccagacccatcattaccacctgccacaatttcagtgattttcgcagacgggttttgccgggttgcgcagcaatattcagtggtgaattaatagccataattgctgcctcccctgcgtaataaggtttgcggtcgtgtcaacctgaaatcaaacctgtttagcaagggaagcaaagggggcggagtccagtcagtagcaggaggggcgcatacgcagcctccctcgccatgcggggatttaatcatcggcatcatctcatttcctcgtcacagtcttaatcgttaacggaagcccgttgccgcctgcgctccataacgcgacatccgggaaatgtctggattaccagcaaatgtcaggcctggctccgctcaggccgatgaaacaaccccgcatggggaattacgcgtttttcaacatccactcaatttctgtttctgtgatgaggcgctcaaactgcaacagctcatcatttttacaggcgtgatacacatggcaaaaccgttcgcctaaatagcggcgcaggtgatcattctcgataaactcacccagggcatcgctctggcgaatcgggaagggtaagccttcctgttccagcccgttgccttcgacttcttcctgcaacggcagctcgttatcaaggccatgcaaaataccggcaaaaatcgctgccatcaccagatatgggttggcatcggcacccgccacgcgatattccacgcggtgattatgacggtcgccgcacggaatacgcagggcgacggtgcggttgttatggccccacgacgcctgcgtcggcacatacattcccggctggaagcggcgatacgagttcacgtttggtgccagcaacgccatcgacgacggcatcaggtcaatcatcccggcgagcatctttttcagcagcggcgaatcttcgccttctgtgtcagaaagcacattctcgccacgattattttgcatactgatatggatatgcatcccgctgcccgcgtgctcttcatacggcttcgccataaaagtggcgtgcatcttatgcttttctgccatcagacgcaccaggcgttttagcgccagcgcatcatcgcaggcttccagcacgttatcggtatggtaaaggttgatttcaaactgacccggcgaggcttcggcgaccgcaccgtcggcgggaattaactgtaactgcgccagttcatcaatatcattgagcacgtcggcgaagtggttgaggttatcaacggagtaaacctggctttgtgtattgcggtcatcggtgccgggcgcgcagggcggttgcagatacccttcagcgtcgcgctgacgatccagtaaatagaactccagctctaccgctacaaccgggaacaatccgcgctggcgtagctgctgccacaggcggttaagaacgttccgcggctcaacgtcaaagggagcgccatcttcatcgaccatggtcaggagcatctgaccgataaactctggatcggcggcagaaggggttaaggaaccgagaacaggaacacaagtacgatccggctcgcccatttcctgacccagacccgcttcttctactacgttgcccagaatatccattgcaaacaccgaggccgggaaataacaccctttctccaacttcttcaggcttgaaacagggatacgttttccacggaagcaaccattcaaatcagtaagtaaaacatcaacatattgcgtattcgggtagcgctccaggtagcgtttcacttcctgcgtaaaggcgctaccccgcctctcttctgactgctgaacaaagttctctacttcaacgatattggtttccatgattcttcgcctttggtttgttttccgctcgttatcaaagcgtaaaatataatgaccaccattcgaatctgtatgcaaactaaatgtttgtcaaatgttaaattgagtttgcaaaaatgaaaactcactgctagattgaaaaaatattgaacataaaggtcatttaaagcgcagtaatggcgataatttagtccactttgtgagattgagcatggaaaatataatgaacaatccggttatcggtgtcgtaatgtgcaggaacaggcttaagggtcatgcgacccagactctgcaagaaaagtacctgaatgccatcatccacgcaggcggcttgccaattgcgctaccacatgcgctggcggaaccgtcgttacttgaacaacttttgccgaaactcgatggcatttatcttcctggtagtcccagcaatgtgcagccgcacctatatggtgaaaacggcgatgagcctgacgccgatcccgggcgtgatcttctgagcatggcgataattaatgccgcactcgaaaggcgcattcccattttcgccatctgccggggtttacaagaactagtggtggcaaccggtggttcgttgcatcgcaagctgtgcgaacagcctgaattgctggaacatcgggaagatcccgaactgccggtggaacagcaatatgcaccgtcgcatgaagttcaggttgtagaggggggattactgtctgcgttgttacctgaatgtagcaacttttgggtaaactctctacatggacaaggggcgaaggtcgttagcccacggttgcgtgttgaagctcgctcgccggatggcttagttgaggcggttagcgtcatcaatcatccttttgcgctgggcgtacagtggcacccggaatggaacagtagcgagtacgcgctttcgcgtatattgttcgagggctttatcaccgcttgtcagcaccatatcgctgaaaaacagcgactctgaccactacagtttaaggaaatgcaaatatgagtgatgagggactggcgccaggaaaacgcttgtcggaaatccgccagcagcaggggctttcacaacgtcgtgccgccgaactctccgggctgactcacagtgctatcagtacgatagaacaagataaagtcagccctgccatcagtacgctgcaaaagctgctgaaggtgtatggtctgtcactctcggaattcttttccgagccggaaaaacctgatgagccgcaggtcgtcattaatcaggacgacttaattgagatgggcagtcagggtgtgtcaatgaagctggttcataacggtaacccgaatcgcacgctggcgatgatctttgaaacgtaccagccgggcacaaccactggggaaagaattaagcatcagggtgaggaaataggcactgtactggaaggtgaaattgttctgacgattaatggtcaggattatcatctcgtcgcggggcaaagttatgccattaataccggcatcccgcacagtttcagtaatacgtcggcaggtatttgccgaattatcagcgcccatacgcccaccacgttttaatcttcttgttctgtaagccgggtaagcgcaatgcgcccggcaatctatacacaaaatcattcaagttgcatcaaggcggcaagtgagcgaatcccgatgagcttactcaggtaagtgattcgggggagcaaacgcagccaaggcagaggcggcttgaaggatgaagtgtatataaagaatgtcgccagaaataaacgggcatgcggcccggggatctctgcgccctgacgttcacaaactgcatatatctgatagacgtgaaacaggagtcataatgaattttcatcatctggcttactggcaggataaagcgttaagtctcgccattgaaaaccgcttatttattaacggtgaatatactgctgcggcggaaaatgaaacctttgaaaccgttgatccggtcacccaggcaccgctggcgaaaattgcccgcggcaagagcgtcgatatcgaccgtgcggtgagcgcagcacgcggcgtatttgaacgcggcgactggtcactctcttctccggctaaacgtaaagcggtactgaataaactcgccgatttaatggaagcccacgccgaagagctggcactgctggaaactctcgacaccggcaaaccgattcgtcacagtctgcgtgatgatattcccggcgcggcgcgcgccattcgctggtacgccgaagcgatcgacaaagtgtatggcgaagtggcgaccaccagtagccatgagctggcgatgatcgtgcgtgaaccggtcggcgtgattgccgccatcgtaccgtggaactttccgctgctgctgacctgctggaagcttggcccggcgctggcagcagggaacagcgttgtcctgaaaccgtctgaaaaatcaccgctcagtgcgattcgtctcgcggggctggcgaaagaagcaggcttgccggatggtgttttgaacgtggtgacaggttttggtcatgaagcggggcaggcgctgtcgcgtcataacgatatcgacgccattgcctttaccggttcgacccgtaccgggaaacagctgctgaaagatgcgggcgagagcaacatgaaacgcgtctggctggaagcgggcggcaaaagcgccaacatcgttttcgccgattgtccggatctgcaaaaagcggcaagcgccaccgccgcaggcatcttctacaaccagggccaggtgtgcatcgccggaacgcgtttgttactggaagagagcatcgccgatgaattcttagccctgttaaaacagcaggcgcaaaactggcagccgggccatccacttgatcccgcaaccaccatgggcaccttaatcgacagcgctcacgctgactcggtccatagctttattcgggaaggcgaaagcaaagggcaactgctgctggatggtcgtaacgctgagctggctgccgccatcggcccgaccatctttgtggatgtagacccgaatgcgtccttaagccgcgaagagattttcggtccggtgctggtggtcacgcgtttcacatcagaagaccaggcgctacagcttgccaacgacagccagtacggccttggcgcggcggtatggacgcgcgacctctcccgcgcgcaccgcatgagccgccgcctgaaggctggttccgtcttcgtcaataactacaacgacggcgatatgaccgtgccgtttggcggctataagcagagcggcaacggtcgcgacaaatccctgcatgcccttgaaaaattcaccgaactgaaaaccatctggataagcctggaggcctgaaatgaccgaacataccagcagttactacgccgccagtgcgaataaatacgcgccattcgacacgctgaatgagtcgatttcctgcgacgtttgcgtggtcggcggcggctataccgggctctcttccgcgctgcatctggcggaagcgggctttgacgtagtggttctcgaagcctcacgcatcggctttggcgcaagcgggcgcaatggcgggcagcttgtgaactcctacagccgcgacatcgacgtgatcgaaaaaagctacggcatggacaccgcccgtatgctcggcagcatgatgttcgaaggtggtgagatcatccgcgaacgtatcaaacgttatcagattgactgcgactaccgccccggcggcctgtttgtggcgatgaatgataaacagctcgccacacttgaagagcagaaagagaactgggaacgctacggcaataaacagctggaattgctggacgccaacgccattcgccgtgaagtagccagcgatcgctataccggtgcgctgctggatcacagcggtgggcatattcatccgctaaacctcgccattggcgaagcggacgccatccgcctcaacggcgggcgcgtgtatgaactttctgccgtgacgcagatccagcacaccacgccagcggtggtgcgcactgccaaaggtcaggtgacggcgaagtatgtgattgtcgccgggaatgcgtatctgggcgataaagtagagccggaactggcgaaacgcagcatgccgtgcggcacgcaggtgatcaccaccgaacggctgtcggaagatttagcccgttcgctgatcccgaaaaactactgtgtggaagactgtaattatctgcttgattactaccgtcttaccgccgacaaccgtttgctgtacggcggcggcgtggtctacggcgcgcgcgacccggatgacgttgagcgtcttgtggtgccgaaactgctgaaaaccttcccgcaactgaagggcgtcaaaatcgactaccgctggacgggcaacttcctgctgaccctttcacggatgccgcagttcggtcgcctcgataccaacatctattacatgcagggctacagcggccacggcgtcacctgtacccatcttgccgggcgtctgattgccgaactgctgcgcggcgacgccgaacgtttcgatgccttcgccaatctgccgcattacccgttccccggcgggcgcacgctgcgagtaccgtttaccgcgatgggcgcagcctattacagcctgcgcgatcgtctgggcgtttaatttccgattaacagtgaagagtcaaaaggtgtgaaacatgagcaacaatgaattccatcagcgtcgtctttctgctaccccacgcggggttggcgtgatgtgtaacttcttcgcccagtcggctgaaaacgccacgctgaaggatgttgagggcaacgagtacatcgatttcgccgcaggcattgcggtgctaaataccggccaccgccaccctgaactggtcgcggcggtagagcagcaactgcaacagtttacccacaccgcgtatcagattgtgccgtatgaaagctacgtcaccctggcggagaaaatcaacgcccttgccccggtgagcgggcaggccaaaaccgcgttcttcactaccggcgcggaagcggtggaaaacgcggtgaaaattgctcgcgcccataccggacgccctggcgtgattgcgtttagcggcggcttccacggtcgtacgtatatgactatggcgttaactggaaaggtcgctccgtacaaaatcggcttcggcccgttccctggttcggtgtatcacgtaccttatccgtcagatttacacggcatttcaacacaggactccctcgacgccatcgaacgcttgtttaaatcagacatcgaagcgaagcaggtggcggcgattattttcgaaccggtgcagggcgagggcggtttcaacgttgcgccaaaagagctggttgccgccattcgccgcctgtgcgacgagcacggcattgtgatgattgccgatgaagtgcaaagcggctttgcgcgtaccggtaagctgtttgccatggatcattacgtcgataagccggatttaatgacgatggcgaaaagcctcgcgggcgggatgccgctttcgggcgtggtcggtaacgcgaatattatggacgcgcccgcgccgggcgggttgggtggcacctacgccgggaacccgctggcggtggctgccgcgcacgcggtgctcaatattatcgacaaagaatcactctgcgaacgcgcgaatcaactgggccagcgtctcaaaaacacgttgattgatgccaaagaaagcgttccggccattgctgcggtacgcggcctggggtcgatgattgcggcagagtttaacgatccgcaaacgggcaagccgtcagcggcgattgcacagaaaatccagcaacgcgcgctggcgcaggggctgctcctgctgacctgtggcgcatacggcaacgtgattcgcttcctgtatccgctgaccatcccggatgtgcaattcgatgcggcaatgaaaattttgcaggatgcgctgagcgattaatagcccaacgcaataatgtctgatgcgctgcgcttatcaggcctgcaaacgacgtattgattatgtatgccgaataaagcattcacgccgcatcctgcaagttgtattgctcaacttcgctaaatctggtgctttttcaacaacgcgcggaactgatgataagttaaccccagtaattcagccgcgcgcttctggttatatttcccttgttgcaaactgagttgcagcaactctttttcctgctgcatctgaaactcacgtaaatccagcggcagtgttggaagcgaggtggtttctgaaacggcgatagcgtcttcaggcggacgccgtttaaagggatcaataatgatgtcatcaagcggataatcgctggtgccgtggcgatacactgaacgttccaccacgtttttcaattcacgaatatttcccggccaacgataattcagcaatgtttctctggcgcgctccgtaaaccccgggaacagaggcagcttgatttcccgacacatctggatggcaaagtgttctgccatcaacattatgtcgctttcgcgctcgcgcagtggtggcagttgtacaacatcaaaagccagtcggtcgagcaggtcagcgcgaaaagtgccttcattgaccatcgccgggagatcggcattcgtcgcgcataccaaccgcacattcacctgcaatggctggctgccgccaacgcgctccagttcaccgtactcaatcacgcgcaataatttctcctgcaccatcatcggtgccgtagcgagttcatcaagaaatagcgtaccgccgtcggcacgttcaaatctcccaggatgacgtttttgcgcaccggtaaacgcccccgcttcgtgaccaaacagttcggaatccagcagattttcatttaacgccgcgcagttaagggaaataaacggcccttgccaacgggaggagagataatgcaggcggctggcaatcagctctttaccggtgccgcgttcgccgatgatgagcaccggtttgtccagcggtgcgagatgcgaaacctgttccagcacttcgagaaagctgttcgcctcaccaagtaaattatctttgtattctgccatgatgaaattcgccacttgttagtgtaattcgctaactcatcctggcatgttgctgttgattcttcaatcagatctttataaatcaaaaagataaaaaattggcacgcaaattgtattaacagttcagcaggacaatcctgaacgcagaaatcaagaggacaacattatgggtattttttctcgctttgccgacatcgtgaatgccaacatcaacgctctgttagagaaagcggaagatccacagaaactggttcgtctgatgatccaggagatggaagatacactggttgaagtacgttctacttcggcgcgcgcgttggcagaaaagaaacagctgactcgccgtattgaacaagcgtcggcgcgtgaagttgaatggcaggaaaaagccgaactggcgctgctgaaagagagagaggatctggcacgtgcagcgttaattgaaaaacagaaactgaccgatctgattaagagcctggaacatgaagtgacgctggtggacgacacgctggcacgcatgaagaaagagatcggtgagctggaaaacaaattgagcgaaacacgcgctcgccagcaggcattgatgttacgtcatcaggcggcaaactcgtcgcgcgatgtgcgtcgtcagctggacagtggcaaactggatgaagcaatggctcgtttcgaatctttcgaacgtcgtattgaccagatggaagcggaagcagaaagccacagcttcggtaaacaaaaatcgctggacgatcagtttgccgaactgaaagccgatgatgcaatcagcgaacaactggcacaattaaaagccaaaatgaagcaagacaatcaataataacatccaggcggcgtccgaacgcgccgccgctcatcgtctaaggagtacttatgagcgcgctatttctggctattccgttaaccatttttgtgctgtttgttttaccgatctggttatggctgcattacagcaatcgttctggtcgcagtgaattgtcgcaaagtgagcagcagcgattagcgcaactggctgatgaagcaaaacggatgcgcgaacgtattcaggcgctggaatctattcttgatgcagaacatccgaactggagggatcgctaatggcgggcattaatctcaataaaaaattatggcgtattccacagcagggcatggtccgcggcgtctgcgccgggattgccaactattttgatgtaccggcaaaactggtgcgtatcctggtggtgctgtcgattttcttcggtctggcgctgtttaccctggttgcttacatcattttgtcatttgcgcttgatccaatgccggacaacatggcctttggtgagcagctaccttccagcagcgaattgctggatgaagtcgaccgtgaactggcggcaagtgaaacgcgtttacgcgagatggaacgttatgtcacttccgatactttcacgttacgtagccgtttccgtcaactgtgaggaaagttatgaatactcgctggcaacaggccgggcaaaaggtaaagcctggtttcaaattagcaggcaagctggtacttcttaccgcactgcgctatggcccggcgggtgtggcgggctgggcgataaaatcagttgctcgccgaccgctgaaaatgttgctggctgtggcgctggaaccgctgttaagtcgggctgctaataaactggcacagcgttataaaaggtgaggggagtttcgcaaaaattgttaaatctcaggcgtataatggatggcaattttcatccatagaaggacgcttacatgtttaaaaaaggcttacttgctctggcactggtgttttcactgcccgttttcgccgctgaacactggatcgatgttcgtgttccagagcagtatcagcaagagcacgttcagggggccatcaatattcccctgaaggaagtgaaagagcgcattgccaccgccgttccggataaaaacgacaccgtgaaagtgtattgcaatgccggacgccagtcagggcaagcaaaagagatccttagcgagatgggatatacccacgttgagaacgccggtggcctgaaagacatcgcaatgccgaaggtcaaaggttaaaagaattcaccatgagcggcgcttatgcgccgttttttttctgtcacaccttatttacatccccatagattatttgcgtcagctcacaaatacgctttttccctggtaaaaaatgatttcctgcgtgactaaaacccttgtgctcaattgacagtttattttctgcggagtagtctctcgtttcatgggaccgctaccacggaaaggcaacatgaaacagaaaattacggattacctggacgaaatctacggtggaacatttaccgcaactcatttacagaaacttgtaacgcgtcttgagagtgcgaaacgattaattacacagcgacgtaaaaaacactgggatgaaagtgatgtcgtgttaattacctatgccgatcaatttcacagcaatgatttaaaaccattacccacatttaatcagttttaccatcaatggctgcaaagcattttttcacatgttcatttgttgccgttttatccatggtcatctgatgatggcttttcggtaattgattatcatcaggtcgccagtgaagcgggggagtggcaggatattcagcaactcggtgaatgcagtcatttaatgtttgattttgtctgcaaccatatgtcggcaaaaagtgaatggtttaaaaactatttacaacagcatccaggttttgaagatttttttattgccgttgacccgcaaaccgatctcagcgccgtcactcgcccgcgtgcgttaccgttattaacgccattccagatgcgcgatcattcaacgcgccatttatggaccacctttagtgacgatcaaattgacctgaattaccgtagccctgaagtgttgctggcgatggtggatgttttactctgttaccttgcgaaaggtgctgagtatgtccgcctggatgccgttggctttatgtggaaagagccgggaacaagctgcatccatctggaaaaaacacatctgattatcaaactgttacggtcgattattgataacgttgcgccaggtacagtgatcattaccgagaccaatgttccgcataaagacaacattgcttactttggcgcaggcgatgacgaagcacatatggtgtaccagttctcgctgccgccactggtgctgcatgcggtgcaaaaacagaacgttgaggcgctttgtgcgtgggcgcaaaacctgacactaccttccagcaacaccacctggtttaacttcctcgcctctcacgatggcatcgggctaaacccgctacggggcttgttgcctgaaagcgaaatattagagctggtcgaggcgttacagcaggaaggtgcattagtaaactggaaaaataatcccgacggtacacgcagtccgtatgaaataaatgtgacctatatggatgcgttaagccgccgtgagagtagcgatgaagaacgttgcgccaggtttattctcgcccatgcgattttgttaagtttccccggtgtgccagcgatatatattcaaagtattcttggctcgcgtaatgattacgcaggtgtcgaaaaactcggatataaccgtgcgattaaccgtaaaaaatatcacagtaaagagataacccgagaactgaacgatgaagctacattaaggcatgcggtatatcatgagttgtcgcgtttaattacacttcgtcgcagccataacgagtttcatccggataataattttaccattgatacgattaattcatccgtaatgcgtattcaaagaagtaacgctgatggtaattgtctgactggattgtttaatgtcagtaaaaatattcagcatgtaaatattactaatctgcatggtcgggatctgattagtgaagttgatatattgggtaatgaaataacgctgcgcccctggcaggttatgtggattaaataaaaaggaacatctcatgattaaatcaaaaatcgtgctgttatcagcactggtttcctgcgccctgatttcaggctgtaaagaagaaaataaaacgaatgtatccatcgaatttatgcattcttcggtggagcaggagcgccaggccgttatcagtaaattgattgcccgttttgaaaaagaaaaccctggcatcaccgttaagcaagtgcccgtggaagaagatgcctataacactaaagtcattactctttcacgtagcggttcgctgccggaagtgatcgaaaccagccatgactacgccaaagtgatggacaaagagcagcttattgatcgcaaagcggttgccacagtcatcagcaacgttggtgaaggcgcgttttacgatggcgtactgcgtattgtgcgtaccgaagatggtagcgcatggaccggtgttcctgtcagcgcctggattggcggtatctggtatcgcaaagatgtgctggcaaaagcgggggcttgaggagccgaaaaactggcaacagctgctggacgttgcacagaaactgaatgacccggcgaataaaaaatacggcattgcgctgcctacagcagaaagcgtgttgacggaacaatccttctcccagtttgcgttatccaaccaggctaacgtctttaacgccgaaggcaaaatcacccttgatacaccagagatgatgcaggcactgacctattaccgcgaccttgctgccaacactatgccgggttctaacgacatcatggaagtgaaagacgcctttatgaacggcaccgcgccgatggcgatttactccacctatatccttccggctgtgattaaagaaggcgacccgaaaaacgtcggtttcgtggtgccaaccgagaaaaactctgcggtctacggcatgttgacctcgctgaccattaccgccgggcaaaagaccgaagagacggaagcagctgaaaaatttgtcacctttatggagcaggcagacaacattgccgactgggtgatgatgtcgccaggtgctgcgctgccggtgaataaagcggttgtcactaccgccacctggaaagacaacgacgttattaaggcgctgggtgaactaccgaatcagctaatcggtgaactgccaaatattcaggtctttggtgcagtaggggataaaaactttacccgcatgggtgatgtgacgggttctggcgtggtgagctccatggtgcataacgtcaccgtgggtaaagccgatctccctggcacgctgcaagcgagccagaaaaagctggatgaactgatcgaacagcactaaacccaggacaggaatccgcaatgaacaggcttttttcaggtcgttccgatatgccctttgcgctgctgcttctcgcgcccagcttattactgctgggtggtctggtggcctggccaatggtgtcgaatatcgaaatcagttttttacgtctgccgctcaatcccaacatcgagtcaacctttgttggggtgagtaactatgtgcgtatcctctccgatcccggcttctggcactcgctgtggatgacggtctggtataccgcgctggtggtggcgggcagcaccgtgctcgggctggcagtggcgatgtttttcaaccgcgagttccgcctgcgcaaaaccgcgcgttcgctggtgatcctctcctacgtaacgccgtccatttcgctggtgtttgcctggaaatacatgttcaacaacggctacggcattgtgaactacctcggcgtcgatcttctgcatctctatgagcaggcaccgctgtggttcgataatccgggcagtagctttgtgctggtggtgctgttcgccatctggcgctacttcccgtatgcctttatctcgtttctggcgattttgcagaccatcgacaaatcgctgtacgaagcggcagagatggatggcgctaatgcctggcaacggtttcgtatcgtcacgctgcccgcgattatgccggtcctggcgacggtggtgaccctgcgcaccatctggatgttctacatgttcgcggatgtttatttgctgacgaccaaggtcgatattctcggtgtatatctctacaaaaccgcctttgcctttaatgatttaggaaaagcggcggcgatctcggtggtgctcttcatcattattttcgctgtcattctgctgaccaggaaacgggtgaacctcaatggcaacaaataaacgcacactcagtcgcatcggtttttactgcgggctggcgctgtttctcatcatcacgctgtttccattttttgtgatgctgatgacctcgttcaagggcgcgaaagaggcgatctcactgcatcctacgctgctgccgcagcagtggacgctggagcattacgtcgacatttttaacccgatgattttcccgtttgtcgactacttccgtaacagtctggtggtgtctgtggtttcatccgtggtggcggtattcctcggcattcttggggcttacgcgctttcccgcctgcgctttaaaggtcggatgaccatcaacgccagcttttacacggtgtatatgttctctggcattttgctggtggtgccgctgttcaaaatcatcaccgcgctgggcatttacgacactgagatggcgctgatcatcaccatggtgacgcaaactctgcccaccgccgtgtttatgctgaaaagctacttcgacaccatccccgatgagatcgaagaagcggcgatgatggatggcctcaaccgtctgcaaattatcttccgcatcaccgtgccgttggcgatgtccgggctgatatccgtgttcgtctactgctttatggtggcgtggaacgactatctgtttgcgtcgatcttcctctccagcgccagcaatttcaccttaccggtgggcctgaacgcgctgttcagtacgccagattacatctggggacggatgatggcggcctcactggtgaccgcattgccggtggtgattatgtatgcgctttcggaacgttttattaagagtggtttgaccgccggtggcgtgaagggctaaagcggccagtttctttacaaggagttttaaatgaaaaagttagtagccacagcaccgcgtgttgctgcgctggttgagtatgaagatcgggcgattttagccaatgaagtgaaaatccgcgtgcgtttcggcgcaccgaaacacggaacggaagtggtcgacttccgcgccgccagcccgtttatcgatgaagactttaacggcgaatggcagatgttcactccgcgtccggcagatgcgccgcgcggcattgagtttggcaaattccagcttggcaacatggtggttggcgacattatcgagtgcggcagcgacgttaccgactacgcggtgggcgacagcgtatgcggctacggcccgctctccgagacggtcatcattaacgcggtgaataactacaagctgcgcaaaatgccgcaaggcagctcgtggaaaaacgccgtttgttacgacccggcgcagtttgccatgagcggcgtgcgcgatgccaacgtgcgcgtgggtgattttgtggtggtggtagggcttggcgcgattggtcaaatagccatccaactggcgaaacgcgctggcgcgtcggtggtgattggcgtcgatcctatcgcctatcgctgtgatattgcccgtcgccacggtgctgatttctgccttaaccccattggcactgacgtaggaaaagagatcaaaacgctgaccggcaagcagggtgccgatgtgattatcgaaaccagcggttacgccgacgcgctgcaatcggcgctgcgtggccttgcttatggcggcaccatctcttatgtcgcgtttgccaaaccatttgctgaaggttttaacctcggacgcgaagcgcatttcaataacgccaaaattgttttctcccgcgcgtgcagcgaaccgaacccggattatccgcgctggagccgtaagcgtattgaagaaacctgctgggaactgctgatgaacggttatctcaattgcgaagatttaatcgacccggtagtgacctttgccaatagcccggaaagctacatgcagtatgtcgatcagcatccggaacagagcatcaaaatgggcgttacgttttaattcaaaggaatgaaaaaatgaaaataggcacacagaatcaggcattctttccggaaaacattctggagaaatttcgttatatcaaagagatgggcttcgatggttttgagattgacggcaaactgctggtcaacaatctcgaagaagtcaaagcagcaatcaaagaaaccggtttaccggtgaccaccgcctgcggtggctatgacggttggattggcgactttatcgaagagcgtcgtcttaatggcttaaagcagatcgaacgcattctcgaagcgctggcagaagtggggggtaaaggtatcgtcgttccggcagcgtggggcatgtttaccttccgcttaccgccgatgacctcgccgcgtagcctggacggcgaccgcaaaatggtgagtgattccctgcacgtactggaacaggtcgccgcgcgtaccggaaccgtggtgtatctcgaaccgttaaaccgctatcaggatcatatgatcaacaccctcgccgatgcccgccgttacatcgtcgaaaacgatcttaaacatgtacagattatcggcgatttctatcacatgaatatcgaagaagataacctggcgcaggcgctgcatgacaaccgcgacctgctcggtcatgtgcatattgcggataaccatcgctaccagccgggcagcggcaccctggatttccacgcgctgtttgaacagctgcgcgcggataactatcagggctatgtagtgtacgaagggcgtatccgggcggaagatcctgcccaggcgtaccgtgattcgttggcctggttgcgtacctgctaagaggtctttgtgaaaagtgcaatgacaagctctccgctgcgggtcgcgataataggcgcaggccaggtggcggataaggttcatgcttcgtactactgcacccgcaacgatctggaactggtggctgtctgtgacagccgcctttcccaggcgcaggcgctggcagaaaaatacgggaatgcatccgtgtgggacgatccgcaggccatgctgctggcggtgaaacctgatgtggttagcgtctgctcacctaaccgttttcattacgaacataccctgatggcactggaagcgggctgccatgtgatgtgcgaaaaaccgcccgccatgacgccagaacaggcgcgggaaatgtgcgataccgcgcgcaaactgggcaaggtgctggcctacgactttcaccatcgttttgcgctcgatacgcaacagctgcgtgaccaggtgaccaacggcgttttgggagagatttacgttaccaccgcccgcgccctgcgtcgctgcggcgttcctggctggggcgtctttaccaataaagaactgcagggtggtggcccgctgatcgacatcggcattcatatgctggatgctgcgatgtatgtgctgggctttccggcggtgaaaagcgtgaatgcgcatagctttcaaaagatcggcacgcaaaagagctgtggtcaatttggcgagtgggatccggcaacttatagcgtcgaagattcgctgtttggcaccattgaatttcataacggcggcattctgtggctggaaacgtcatttgcactcaacatccgcgaacagtcgattatgaacgtcagtttttgtggtgataaagccggtgcgacgctgtttccagcacatatctacaccgataacaacggtgaattaatgatgctgatgcaacgggaactggcagacgacaaccgccatttgcgcagcatggaagcctttatcaatcacgtacagggcaagcccgtgatgatagccgacgccgagcaggggtacatcatccagcaactggtggcggcgttgtatcaatccgcagaaacagggacgcgtgtggaattatgaccaggccagtaacgttatcagaaccccatttcagccagcataccctgaacaagtatgcatcgctgatggcgcaggggaacggctatcttgggcttcgcgccagccatgaagaagattacacgcgccagacgcgagggatgtatctggcggggctgtatcatcgggcgggaaaaggtgaaatcaacgaactggtgaacctgcctgatatcttggggatggagattgccataaatggtgaggttttctcgttatcccgcgaagcctggcagcgtgaacttgactttgccagtggagaattacgccgtagcgttgtctggcgtaccagcaacggcacaggttacaccatcgccagccgtcgctttgtttcggcagaccaactgccgctcattgtgctggaaatcactattacgccactggacgccgacgcgtcagtgctgatttcaacaggtatcgacgccacgcaaaccaaccacggtcgccaacatctcgacgaaacccaggtgcgggtgtttggtcagcatctgatgcaggggatctacaccacccaggatggacgcagtgatgtggccatcagctgttgctgtatggtgagcggtgatgtgcagcaatgctataccgccaaagagcgccgtttgcagcaacataccagtgcgcagcttcatgcaggcgagacagtgacgttgcaaaaactggtgtggatcgactggcgggatgacaggcaagccgttttagacgagtggggcagcgcgtcgcttcgccagcttgaaatgtgcgcgcagcagagttacgaccaacttcttgcagtatcaacagaaaactggcgtcaatggtggcagaaacgtcgtatcacggtaaatggcggcgaagcgcacgatcagcaagcgttagattatgcgctttatcatctgcgcatcatgacgcctgcccacgacgagcgcagcagcattgcggcaaaaggcttaaccggcgaaggctacaaaggccacgttttctgggatacagaagtatttttgttaccgtttcatctgtttagcgatccgacggttgcccgaagtttactgcgttatcgctggcacaacttgccaggcgcgcaggagaaagcgcgacgcaacggctggcagggcgcgctatttccgtgggaaagcgcgcgcagcggcgaagaagagacgccggaatttgccgccattaacattcgcaccgggctgcggcaaaaagtggcctcggcgcaggcggaacatcatctggtggccgatatcgcctgggcggttattcaatactggcagaccacgggggatgaaagtttcattgcgcatgaaggcatggcgctacttctggaaactgcaaagttctggattagccgcgcggtgagggttaacgaccgtctggaaattcatgatgttattgggcctgacgaatataccgaacatgtcaataataacgccttcaccagctatatggcgtattacaacgtccagcaggcgctgagtattgcccgccagtttggctgtagcgacgatgcgtttatccatcgcgccgaaatgttccttaaagaactgcggctgccagaaattcagcccgacggcgttttgccgcaggatgattcgtttatggctaagccggcgattaatctggcgaaatacaaagcggcggcggggaagcaaaccattctgctggattattcacgcgcagaagtgaacgagatgcaaatcctcaaacaagctgatgtggtgatgctcaattacatgctgccggagcagttctcagcggcatcgtgtcttgccaatctgcaattttatgaaccgcgcactattcacgactcgtcattaagtaaagcaatccacggcattgttgccgcacgctgtggcctgctgacccaaagttatcagttctggcgcgaggggactgaaatcgatcttggtgctgatccgcatagttgtgatgatggtatccatgctgccgcaactggcgctatctggctgggggcgattcagggttttgccggggtgagcgtgcgtgacggtgaattgcatctcaatccggcgttacctgagcagtggcaacagttgtctttccctctgttctggcagggctgcgaattacaggtcactcttgacgcgcagcgtattgcgattcgaacttctgcgcccgtttcactgcgtttgaacggtcagcttatatccgtggctgaagaatctgttttctgtttgggtgattttattttgcccttcaatgggaccgctaccacacatcaggaggatgaatgaaactgcaaggggtaattttcgatctggatggtgtaatcaccgataccgcgcatctgcatttccaggcgtggcagcagattgccgctgaaattggcatcagcattgatgcgcagtttaacgaatccctaaaagggatcagccgcgatgagtctctgcggcgcattctgcaacacggggcaaagagggcgactttaactcgcaggagagggcgcaactggcgtatcgcaaaaatctgctctatgtccactcactgcgcgagttgacggtcagcgctgttctacccggcattcgctctttgctggcagatctccgtgcacagcagatcccggttgggctggcttctgtctccctgaatgcgccgacgattttagcggcgctggagctgcgcgagtttttcaccttctgcgcggatgcttcccaacttaaaaactcgaaaccggatccggaaatctttctcgctgcctgtgccgggctgggcgtgccgccgcaggcatgtatcggcattgaagatgcgcaggcgggcattgacgccattaacgccagcggtatgcgctcggtggggatcggcgcgggcttaaccggggcgcaattactgttgccttcaacggactctctgacctggtcgcggttatcggccttctggcaaaacgtatagcaaaggaatcaacatggctcagctttcgttacaacatattcaaaaaatctacgataaccaggtgcatgtggtgaaggacttcaacctggaaattgccgataaagagttcatcgtgtttgtcggcccgtcgggctgcggtaagtcgaccaccctgcgcatgattgccgggcttgaggagatcagcggcggcgatctgttgatcgacggcaaacgaatgaatgacgttccagccaaagcacgcaatatagcgatggtgttccagaactacgcgttgtatccgcatatgacggtttacgacaacatggcgtttggcctgaagatgcaaaaaatcgccaaagaggtgattgatgagcgggtgaactgggcggcgcaaattctcggcctgcgtgagtacctgaaacgcaagccgggcgcgctttccggcgggcaacgccagcgtgtggcgctcgggcgggcgattgtgcgcgaagcgggcgtgtttttaatggatgaaccgctctctaaccttgatgccaagctgcgcgtgcaaatgcgcgcagagatcagcaagctacaccagaagctgaataccaccatgatctacgtgacccacgatcagaccgaagcgatgaccatggcgacgcggattgtgattatgaaggatgggattgttcagcaagttggtgcgccgaaaacggtttataaccaaccagcgaatatgtttgttgccggatttattggatcaccggcgatgaattttattcgtggcacgatcgatggcgataaattcgttacggaaacgcttaaattaaccattcccgaagagaaattagcggttctgaaaacacagggaagtttgcataagcccatcgtgatgggaatacgtccggaagatattcatccggacgcgcaagaggaaaataacatttccgccaaaattagcgtggcagaattaaccggtgcggaatttatgctctacaccacggttggggggcacgagttagtggtccgtgctggtgcgttaaatgattatcatgcaggagaaaatatcactattcattttgatatgacgaaatgtcatttctttgatgcagaaacggaaatagcaattcgctaaatacagggggaaggcattcccccagaataatacaaggaacaataatgaaaaagttattaccctgtaccgcactggtgatgtgtgcgggaatggcctgcgcacaggccgaggaaaggaacgactggcactttaatatcggcgcgatgtacgaaatagaaaacgtcgagggttatggcgaagatatggatgggctggcggagccttcagtctattttaatgccgccaacgggccgtggagaattgctctggcctattatcaggaagggccggtagattatagcgcgggtaaacgtggaacgtggtttgatcgcccggagctggaggtgcattatcagttcctcgaaaacgatgatttcagtttcggcctgaccggcggtttccgtaattatggttatcactacgttgatgaaccgggtaaagacacggcgaatatgcagcgctggaaaatcgcgccagactgggatgtgaaactgactgacgatttacgtttcaacggttggttgtcgatgtataaatttgccaacgatctgaacacgaccggttacgctgatacccgagtcgaaacggaaacaggcctgcaatataccttcaacgaaacggttgccttgcgagtgaactattatctcgagcgcggctttaatatggacgacagccgcaataacggtgagttttctacgcaagaaattcgcgcctatttgccgctgacgctcggcaaccactcggtgacgccgtatacgcgcattgggctggatcgctggagtaactgggactggcaggatgatatcgaacgtgaaggccatgattttaaccgtgtgggtttattttacggttatgatttccagaatggtctttccgtttcgctggaatacgcgtttgagtggcaggatcacgacgaaggcgacagcgataaattccattatgcaggtgtcggcgtaaattactcgttctgataatgggctaaattgccggatgcggcgcgagtactttatccgatctataaatgtaggccggataagatgcgctagcatcgcatccggcattcaggcaaggtagctggtatttatttcagcgtcatatgcgtggcaacggtaatattctgtggtgacggttttccagaaattaagcggaataataactcgcagctttgttgacctaactcctgcgtcggaacatcgatgccgcctggtgcaggcgttaaaataaacgacagcgtttcattactataacccaccaccgctaactgctgcggaatagcaatatttttctctgccgccgcacgataaatgctcattaatttcaggctgtcagtggcaaacactgcctcaggcaacggtgactgacttaataattgccgtgctgcttgcagtgctgtttcatgggtataaccgccgtcaacaatccatttatcacgcactgcaatattatgcgcggacagactttgcttatagccattaacgcgatcaaccgaaacatggacatcaagcggagcatgcaggcaggcaatattttgatgcccactttcaattaatgcatcggtcaacgcaatgctgtcgccaaaattatcggtatcgacagaataaacatgggcatattgaccttcaactttgccaattaccaccaccggaatatcgtatttatcgagttgggcaaaaaatgactcatccgctggcgaactgagcataataatgcctttaatcattttctgcttaattttgctttcacatttttgtaagtcttctgccggattgtgcgacgtctgcaatatcacgtcgaaaccttcctcttcagctttggcggtgatggcatgcaaaacttcagagaaaaacggattacccgccgtagttttggtcgaacgggtagaaatcaccataatggcatcaaaacccgaagaggtcagcgcgcgggctagcttgtttggctgatactgtaattcttcaatggcccgtaacactttttcgcgcgcttccggggagatattagtttgcttattcagcacgcgtgatacggtggattttgatacgcctgcaaccctggcaatatcataaatagtaggggacataggtcaggaactccgtccgaacgtgaatgctgcacatcttatggagttcgcccgtcgatgacaacacgggcagttgataatcaatggcctggcccccacattcatatccttacgaatgatttttttctggtcttcagagcagcacaggacagcaatgaagcgacttaaaaatgaacttaatgcgctggtgaatcggggtgtcgacagacatctgcgcctcgccgtaaccggactaagccgcagcggcaaaacagcgtttatcactgcgatggtcaatcagttgctcaatattcacgccggagcacgcttgccgctgttaagcgcggtgcgtgaagagcgcctgctgggcgtgaaacgcattccccagcgtgactttggcattccgcgcttcacctatgatgaagggctggcgcagttatatggcgatccacccgcctggccaacgccaacgcgcggcgtcagtgaaatccgcctggcgctacgttttaaatcgaacgattcgctgctacgccacttcaaggacacctccacgctgtatctggagattgtggattatcccggcgaatggttgctcgacctgccgatgctggcgcaggactatttaagctggtcacgccagatgacgggcttactcaatggtcagcgcggcgaatggtcggtcaaatggcgaatgatgtgcgaagggctggacccgctagcacctgccgacgaaaaccggctggcagacattgccgccgcgtggaccgattatctccaccactgtaaacagcaggggctgcactttattcagccagggcgctttgtcttgccaggagatatggcaggtgcgcccgcgctgcaattcttcccgtggccggatgtcgatacctggggcgagtccaaactggcgcaggccgataagcacaccaatgccggaatgctgcgcgagcggtttaattattactgcgagaaggtggtgaaggggttctataagaatcattttctgcgctttgaccgccagattgtgctggttgattgcctgcaacctctcaacagtgggccacaggcatttaatgatatgcgtctggcactgacgcagctgatgcaaagtttccactacgggcagcgtaccttgttccggcgtttgttttcgccggttatcgataagctattgtttgctgccactaaagcggaccatgtgaccatcgatcagcacgccaatatggtttcattactgcaacaactgattcaggatgcctggcaaaatgcggcgtttgaagggattagtatggattgcctggggctggcctcggtgcaggcgaccaccagcggcattattgatgttaacggtgagaaaatcccggcgctacgcggtaatcgactcagcgatggcgcaccgctcactgtttatcctggcgaagttcccgctcgtttgcccggtcaggcgttctgggataagcaaggcttccagtttgaggcgtttcgtccgcaggtgatggatgtcgacaaaccgctgccgcatattcgccttgatgccgcgcttgaatttttaataggagataaattgcgatgaccgaaccgttaaaaccacgtattgatttcgacggttcgctggaggtcgatcagaatccaaaattcagggcgcagcagacctttgacgaaaatcaggcgcaaaattttgccccggccacgctcgatgaagcgcctgaagaagaggggcaagttgaagcggtaatggatgcagcgttacgtccgaaacgcagcctgtggcgcaaaatggtgatgggcgggctggctctgtttggcgcaagcgttgtcgggcagggtgtacagtggacaatgaatgcctggcaaactcaggactgggtggcgctgggtggatgtgccgctggggcattgattatcggcgctggcgtaggttctgtggtaacagagtggcggcgcttatggcgcttgcgacagcgcgcccatgaacgcgacgaagcgcgcgatttgttgcacagccacggcacgggcaaaggccgcgcattttgcgaaaaactggcgcagcaggcgggtattgatcagtctcatccagcgctgcaacgctggtatgcctcaatccatgaaacgcaaaacgaccgtgaagtggtcagtttgtatgcgcatttggtccagccagttttagatgcccaggcgcggcgcgaaatcagccgttcggcggcggaatcaacgttgatgattgcggtcagcccgctggcgttggtcgatatggcgtttatcgcctggcgcaatctgcgtttaattaatcgcatcgccacgctgtatggcattgaactggggtattacagccgtttgcgtctgtttaagctggtattgctgaatatcgcttttgccggagccagcgaactggtgcgcgaagtggggatggactggatgtcgcaagatctcgctgctcgtttgtctacccgcgcagctcaggggattggtgcaggacttctgacggcacgactcgggattaaagctatggagctttgccgcccgctgccgtggattgacgatgacaaacctcgcctcggggatttccgtcgtcagcttatcggtcaggtgaaagaaacgctgcaaaaaggcaaaacgcccagcgaaaaataatgcaatatcgggtgctgaccggatatctttacgccgaagtgcccgtttttccgtctttgtgtcaatgattgttgacagaaaccttcctgctatccaaatagtgtcatatcatcatattaattgttcttttttcaggtgaaggttcccatgcgtctggaagtcttttgtgaagaccgactcggtctgacccgcgaattactcgatctactcgtgctaagaggcattgatttacgcggtattgagattgatcccattgggcgaatctacctcaattttgctgaactggagtttgagagtttcagcagtctgatggccgaaatacgccgtattgcgggtgttaccgatgtgcgtactgtcccgtggatgccttccgaacgtgagcatctggcgttgagcgcgttactggaggcgttgcctgaacctgtgctctctgtcgatatgaaaagcaaagtggatatggcgaacccggcgagctgtcagctttttgggcaaaaattggatcgcctgcgcaaccataccgccgcacaattgattaacggctttaattttttacgttggctggaaagcgaaccgcaagattcgcataacgagcatgtcgttattaatgggcagaatttcctgatggagattacgcctgtttatcttcaggatgaaaatgatcaacacgtcctgaccggtgcggtggtgatgttgcgatcaacgattcgtatgggccgccagttgcaaaatgtcgccgcccaggacgtcagcgccttcagtcaaattgtcgccgtcagcccgaaaatgaagcatgttgtcgaacaggcgcagaaactggcgatgctaagcgcgccgctgctgattacgggtgacacaggtacaggtaaagatctctttgcctacgcctgccatcaggcaagccccagagcgggcaaaccttacctggcgctgaactgtgcgtctataccggaagatgcggtcgagagtgaactgtttggtcatgctccggaagggaagaaaggattctttgagcaggcgaacggtggttcggtgctgttggatgaaataggggaaatgtcaccacggatgcaggcgaaattactgcgtttccttaatgatggcactttccgtcgggttggcgaagaccatgaggtgcatgtcgatgtgcgggtgatttgcgctacgcagaagaatctggtcgaactggtgcaaaaaggcatgttccgtgaagatctctattatcgtctgaacgtgttgacgctcaatctgccgccgctacgtgactgtccgcaggacatcatgccgttaactgagctgttcgtcgcccgctttgccgacgagcagggcgtgccgcgtccgaaactggccgctgacctgaatactgtacttacgcgttatgcgtggccgggaaatgtgcggcagttaaagaacgctatctatcgcgcactgacacaactggacggttatgagctgcgtccacaggatattttgttgccggattatgacgccgcaacggtagccgtgggcgaagatgcgatggaaggttcgctggacgaaatcaccagccgttttgaacgctcggtattaacccagctttatcgcaattatcccagcacgcgcaaactggcaaaacgtctcggcgtttcacataccgcgattgccaataagttgcgggaatatggtctgagtcagaagaagaacgaagagtaagcgcgaatatgcctgatggtgcaacaccatcaggcatattaaattatgctttcagtacagccagagctgcttcgtaatccggctcggtggtgatttcatccaccagctggctgaaaatcacattgtcattttcgtcaataaccacaacggcacgcgctgccagacctttcagtgggccatcagcaattgccacaccgtaagcttgcagaaattcagcgttacggaaagtggagagggtgataacgttgttcagaccttctgcgccgcagaaacgagactgggcgaacggcagatcggcagagatacacagcacaacggtgttgtcgatctcagttgccagttggttaaacttacgtactgatgcggcgcaaacaccggtatcaatactcgggaaaatgttcagcactttgcgtttacccgcaaactgaccgagggtgacgtcagacagatcttttgccacgagagtaaaagtctgcgctttgctacccgcctgcgggatggaattggcgactgtaaccgggttgccctggaaatgaacggtttgtgacatgattatctttcctgtttacatatagttaacgtcacacctagtttatgctaactgtcaataacacagcaaacgctatttgcgcttaatctgcagaccaccgcgacaacaaggagtaaagatgagaaccgttaaggtatttgaggaagcctggcccttacataccccgtttgtgattgcccggggaagtcgcagtgaagcgcgcgtggtggtggttgaactggaagaagagggtattaaaggcaccggcgaatgcacgccgtatccgcgttatggagaaagtgatgcctcggtaatggcgcaaattatgagcgtcgtgtcgcaattagagaaagggctgacacgggaggagttgcaaaaaattctccctgccggcgcagcacgtaatgcgctggattgtgcattgtgggatctggccgcgcgaaaacagcagcaatcgctggctgatttgatcggcataacgcttcccgagacagttatcactgcacagacggtagtcatcggtacgcctgatcagatggccaatagtgcatcaacactctggcaggcaggcgcgaaattactgaaagtgaagctggataaccatcttattagtgagcggatggtggcaattcgcacagctgtgcccgatgcgacgctgatcgttgatgcaaatgaatcctggcgtgcagaagggttggcggcgcgttgccagctattggcggatttaggcgttgcgatgcttgaacaaccccttcctgcgcaggacgatgcggcgctggagaattttattcatccgttgccgatttgtgctgatgagagttgtcatacacgtagcaatctgaaggcgctgaaagggcgctatgagatggttaacattaagctcgataaaaccggtggtctgacggaagcgctggcgctggcgactgaagcgcgtgcacaaggtttcagtctgatgctgggctgcatgttgtgtacctctcgtgccattagcgccgctttaccgctggtgccgcaggtcagtttcgccgatattgacggaccgacctggctggcggtagatgtggaaccggcgcttcagttcacgacgggcgaattgcatctttaggatgccagcgcagcaagtttgccatcgcaaagagatatttttcgctggcttcgtcggaggagatgggcggaaactctgcggtgatgcaatgcaagttgagatctgcacaccaactgccgaaagagccaggcgtttcataaccgacgctggttaccagaggcaattcaaacgcctgggccagccattcgcctaattcgctgtgtctgggatcttcaatacaggccagtggatcgtggaatgagaccacccaggcaggttgaatgcggtgtataagctggcacagcgcctgggtttcaggttctgagccaggtttgtcacctgtcagtaatacgacatcacgttcttcagcggcgctgttccagcgataaaccgtttcaccttccttccagttcgccgccggaaagtttctgtttaaatccacaccattagcattggcccgtaaccccagctggcagccgtcaggattcgcacacagcaccacatgatggcggcgcaaagaaggtgtcaacgtccgcagagcacaggagagcgtgacgaccgaagagttttcatcaccgtgagtgccagccagaatcaaaccactttcgcggctgggtgcaggggcaggaaaccagattaacggcgcgcccaataatgaacgtccgtaatgttctgttccgggcggaaatgcgccgcgttcggcgcgtgggcgggttacggtcatgatcgtctctggttcaggaagtattacaggcagtgttgtgcaaattttgcggattatcaaatccttttcttcaacgctatgtcatcgatcttgtatcactttatttgccggaagttgtttgcattttattagttggatagggtttgtggatttttgctggctgacgggcaaataaagtttgtttaatggtttgcttatctgccagttgattaatcacatggcgggctatctgaccgccagcaccaagaatcagtacctttttcatgaaaattatcccagattattggcagcaatatgccaggccatatcactattgcggatttgaatatgtttcattacagagtttcctcaaagaacggagctaatactgaaattgcttcagccacataggctttgccgtcataaagatccatatggtttgcgccttcaacaatgtgatagcgtttatcctggcttgatgctcgatcgtacaggtcgtcactcatccatttgctccctgcctggctgcccgccacaatctgcatcggctgagtcaggtacacttccgccatatggtaagcatcataggtaataatctggttaaggctgcgcaaagtagcgtaacccggtgctgttggatactgcgcgcgaggggtgtggtaatactcccaggcctgacgcagttcttcgttcggcgcatcggactccttcattggtgccagtggcataacggcatattctccgctgctaatatcgctggttcgggcgtttgaacccgcttcaacgtatggcagggcatcaatagatttcacattgttttcccaaccattacggaacatcgaaccaatattgaccgcactaacggtaccgatggccttgatgcggcgatcctgaattgcagcattggctgtatatcctgcaccggcacaaattcccatcgcaccaattcgggtattgtcgacataagaaagcgttgtcaggtaatcaatcacggcactgatgtcttcagtacgaatgtatgggttttctaactgacgcggctcgccgccactttcaccttgataagatgcgtcataagcaatagtgacaaatcccttttccgccagttttttggcataggttccggccgtttgttctttaacgcccccacctgggtgagataccacaattgcctgatactgacgggtttcatcaaattttggagggaaatagatcactgcagacaaagagatggttggattattgctgttagtgaagctgactttattattcatcattccgttcctcatggagttgtcggttcgttttaacggttggtgatatcactatagatattgatcattaagttgattagacccaaaatcatgattagacctatcatttaaatgattaatagattgcatggagatactgaatgaagcgtgaagaaatcgctgatctgatggcgtttgtcgtcgttgcagaggagcgtagcttcactcgtgcagcagcccgcctgagcatggcgcagtcagctttaagccagatagtgcgtcgtatagaagaacgattgggattgcggcttctgacgcgaaccacgcgcagcgttgttccaactgaagcgggcgagcatcttttgtctgttcttggccctatgttgcatgacatagattcagccctggcatccctgagcgagctgcagaaccgcccatccgggacaatacgtattactactgtagaacatgcagcaaaaacgatattgttaccagcaatgcgcacattcctgaaatcgcatcctgaaattgatattcagctcaccattgattatggtttgaccgatgtcgtttctgaacgttttgatgcaggcgtccgtctgggtggggagatggataaagatatgatcgccattcgaatcgggccagatataccaatggctattgttggctcaccggattatttttctcgccgaagtgttccaacgtcagtgtcacaattaatagatcatcaggcaattaatttgtatcttcccacatcgggtacagcaaatcgctggagattaatacgcggtggacgtgaagttcgtgttcgcatggaaggtcagcttttactgaatacgatagacctgatcattgatgctgcaattgatgggcatggattggcgtatctaccttatgatcaggttgagcgggctattaaagaaaaaaaactgatacgtgttttggataaattcccaccagatttacccggttatcacctgtactatccacaccgtcgacatgctggctcggcattctcattatttatagataggctgaagtataaaggtgctgtttagcactacttgctgatacattaatttaatttctctcttaacgtattctcagttcctttcaacgttttggttattttttattcttcgtacaatggcgacagatgctgattatgataccgaaaactggtttgaacgtgcgaagcctgaacgtagtgttcggtgttctatgtgctttaccgcattttggcgtcgattatttacactaaatctgatttaatatattgatacataaaacattttatgcttcctgtgtcacttttttgatggaagttgtttgcatttctttaaggcgaaacaaataattacgcatcaattttaatgtcggttagagggaaacttatgaagcactctgtttcagtcacgtgttgtgcgctgttggtcagcagcatttctctttcgtatgctgcagaagttccgagcggcacagtactggcagagaagcaggagctggtgcgccacattaaagatgagcctgcgtcgctggatcccgctaaagccgtgggcctgccagagattcaggtcattcgcgatctgtttgaaggactggtgaatcagaacgagaaaggggagattgtccccggcgttgcgactcagtggaaaagtaatgacaaccgtatctggacttttaccctgcgcgataacgcaaaatgggcggatggcacaccggtaacggcgcaagattttgtctacagctggcagcgtctggtggacccgaaaacgctatcgccatttgcatggtttgccgcgctggcgggaatcaacaacgcacaggcgattattgatggtaaagctacgcctgaccagcttggcgtcaccgcagttgatgcccataccttgaaaattcagcttgataaaccgttgccgtggtttgtgaatttaaccgctaactttgccttcttcccggtgcaaaaagccaacgtagaaagcggtaaagagtggacgaaacccggaaatctgatcggcaatggcgcttatgttcttaaagatcgcgtagtcaatgaaaaactggtcgtggtaccgaatacccattattgggataacgccaaaacggtactgcaaaaagtgaccttcctgccaattaatcaggaatccgcagccactaagcgttacctcgcgggggatattgatatcaccgaatccttcccgaaaaatatgtatcagaagctgttgaaggatattccggggcaggtttatacgccgccgcagctcgggacctattattatgcgtttaacacgcaaaaagggccgacggcagatcagcgcgttcgtctggcattaagtatgacgatagatcgccgcctgatgaccgaaaaagtattagggacgggcgaaaagccagcgtggcattttacaccagatgttaccgccggatttacgccggaaccttcgccgtttgaacaaatgagtcaggaagaactgaatgcgcaggcaaaaactttgttgagcgcagctggttatggtccgcaaaaaccgctgaagctgacgcttttgtataacacttcagaaaaccatcaaaaaattgcgattgctgtagcatcgatgtggaaaaagaaccttggcgtagatgttaaattgcaaaatcaggaatggaaaacctatatcgatagccgtaacaccggcaattttgatgttatccgcgcctcatgggtgggggattataatgaaccctccactttcctgacattattaacgtcaacgcattcaggaaatatttcacgctttaacaatccggcatacgacaaagttctggcccaggcatcgacggaaaataccgttaaagcgcgtaatgccgattacaacgcggcagaaaaaatcctcatggagcaagcaccgattgcaccaatttatcaatataccaatggacgattaatcaagccgtggctgaaaggttatcccattaataacccggaagatgtggcgtacagccggactatgtatattgtgaagcattgatgtgatgggaactggcgttacccttgtggataacgccagtgatgtctgatttagcgcccctgttcctgcggtgtaatgttatccatatacagcgtctggctggggaaggcaaagtccgcgccgtgtgactgcacaatatcgataatcttcaaataaacgtcttgctgtgcagcaagccattcagcccataccgtggttttggtaaagcaataaaccataatattcaatgacgagtcggcaaactggttgaaataaaccagtaaggtttgtcgctggtcgatggccgggtgatttttcagcatctcacgtacggcttcgacaataacgcccacttttgccgcatcctcataacgtaaaccaatggtcgtggtaatgcggcggttggtcattcgtcctgggttttctacgctgatcgacgaaaacagcgagttcggtacgtacaatggacgattatcaaaggtcgtaattttggtaattcgccagccaatttccgctactgtaccttcgatatttctgtccggtgaacggatccagtcgccaatactgaaaggacggtcgaaatagagcatgatcccggaaaagaaattactcagaatatctttaccggccataccgacagccagaccaccaataccaccaaaggtcaacaagccagaaaggctcatgccgaaatgttcgccataaagcagaacaagcaccacaataatggtgattttgataatgcgcgacataatccgcgcactggtgatatcgcgaccttttttaatctgctgtttttcaaactgattaatcagcaaaatagcttaatcgtcagaataaccgcaatcagggacgtacagataaaatcgataacgcctggggtgataaatttgagtttatagttttctataacataattaataatgctaccaacagcactgataattatggtgtagattaaaaattgcaccgcatggaataaaaaaccttttcttttacgatttccgcggcgaaaccaaaagctcatcagaatcaatgctgcgcagctaccgaaaataatgaccagattaagcgcattatttgtaaacagttcagcgatcattgttttatcaggctcctccagataattgtcgtcatgccggaaacccctggcggggctattttaccgcgacaattcattcagatcatcaatagtcagggaaggaagtagcaacattagctaactaatcaatgcgttgattgtaaatccagctaagaggtgaggttttcagagcagacaacggtgaaatgtcatggtattgttacgtttaggtaacaagaaatttgtctgcacaaggattacatcatgattatggcgaaactgaagtcagcgaaagggaagaaatttctctttggtttgttggcggttttcattattgcggcgtcggttgtgactcgcgcgactatcggcggcgttatagaacagtacaatattccgctgtctgagtggacgacatcaatgtatgtgattcagtcatcgatgatttttgtttatagcctggtctttactgtgttgctggcaatcccgttgggaatttatttccttggcggcgaagagcagtaagtaaaaaataggcccgataactcgggccttgtcagttattgaagagtcgttaatcgtcttcttcgtcatccagttcaacgggtgtctgatactggtcaggtttaatgaccaacagatcgcagcgaagatgatcaatcacctgttccgccgtgttgccgaggaatgctgctgaaataccggtgcgtcctaccgtgcccagaaccacaatccccgcctgtaagtgttccgccaaatcaggaatcacctcttctggcagacctttttctacgtgcgtcatgttttcattaatgccgaatttctgccgcagagctttcattgccagcaaatgttgcccacgaatggcatcgttataaacgctcggatcaaattccggcagttcaatcgcgatattaattggcgttaccggataagcgccaaccagatgaacttcggtatggttgacttgttctgccagttcgatcgtctctttgaccagtttttcattgagcgcattatgatacggctcttcactggcgagattcaccgccaccagcgccttgcctccttccggccacggctggtctttcaccatccacaccgggcttgggcatttgcgtaacagatgccagtccgttggcgtaaaaatcaccgcttccagacggtcatgttggtgcgccatttttagcaccaaatcgtgcccgccgctgatcacttcctgaatgatggcttcgaaaggacggttatgccagaccactttaatttcaatgggaacgccagcattgagataatattttgcctgctcgtggatccaggctgtacgctggctgatgacgcctgatgcatagccgtacgttcgtccggggagagcagggtggtcatttcgtatgagaagtcatagatcggcaaaaaggctttaattttgccaccaatccgttgatgtaaataaacagctcgccgcaatgctggttggtcgtcctggttaggatcgataacaacgagcatgttctgatacatagccatacagggtctccttacaacaactgtcaacgcagtttgtaattaaaagattaacccatatctggtgaatgaaacagtgatgaaccttctgccagatcaataaatcagaaaaatttaatgatatgacagaaggatagtgagttatgcggaaaaatcaggcaacattacgcgtatgaccagcaagctgggccagcgcatcgttattttcgatggtgatgtatttacctttgactgccagcataccgcttttctggaagcgacctagcagacggctgatggtttctaccgtcaggcccagatagttaccgatatcgccacgagtcatcgtcaggcggaattcacgaggggagaagccgcgttgggcaaaacgacgggacaggttgtagatgaatgcagccagacgttcctcggcatttttcttcgacaacagcaggatcatgtcctgatcgcctttgatttcaccgctcatcagacgcatcatctgctgacgcagattcggcattttaccggacaaatcgtccagcgtttcgaacgggatttcacataccatcgaggtttccagcgcctgagcgaagctcgggtgatggccgctgccgatggcgtcaaatcccaccaggtcgccagctaaatggaaaccagtgatttgctcgtcgccttgctcagtgatggtataacttttaatcgtaccggagcggatggcataaagcgatttaagttcatcaccagccttaaacagcgtctggcctttctgaataggcttcttccgctcaatgatattatcaagctgatcaagctcatgttcgttgagtgtgaacgggatgcaaagctggctgatgctgcaatcctggcaatggatagcacaaccgccagactgaatgcgccgtataattcgcttttccgggatcataggtctgctcaagccgtaattgatatttgtcaattttaacatctttttagggagcaagtaagtctaagcaaaccttaacagcagagaattccgatattagatgtaaatatatgtctatctatttgaaaaccattaagttgttaagggtaactttacataaaagtgtgaacaagctggcacaaattgtttaatgtttacagcaaaagataaccttcgtggcgcaataaccactcttttcgctgaactccgcctgcatatccggtcatggtgccgtttcggccaataacccgatggcaaggtacgacgatgctgatgggattcgatccgtttgccgcaccaacggcacgcgccgcgccagggcggcccaattgttcagccagttggccgtaatgcattacctgcccgcaggggatagtgcgtagagttttccagacttcgcgctgaaatggcgtcccccctgtggcagtgggaagcgtatcaataatgctaagattaccggcaaaataatcactaagcttgtcgcttaaaccgcctgggttggtggcagaaatgcgctcatagccttctttgcgataatggatgtccagcagctgcaccatgcgttcgctgtactcttcccattcaaccgcccgcaggcgaaattgctcatcgcaaatcacccacagtggacccagtggcgtggcaattttttcttcaagtaatctcagcatccgttctctcttaagacaaacgtgggtaaatccccggacctatcggcagaccaacaagataccacgccagcaacatcagcagccataccaccaaaaagataagcggatagggcaagactaacgaatagtaagtacccagtttcgcgtctggtttgtagcgttgcaggaatccaagaaacagtgggacaaaaggagataccggcgctaaaggcaatacggatgagtcggcaatacgaaagaggatttgcgcaaatgccgggtgaaagccaagtagcataaacattggtacgaaaatgggggccagaatcgaccagattgcggaaccgctggcaataaacatgcataagaaagaggaaagcaacgccagaccgacaaacgccggtatgccgctaagccctgaactttccagtatatcggtcagccccacggcgatgaatttccccatgttgctccagttaaacatggcgacaaattgggcgaggggaaaaaccatcacgataaatcccgccatctctttcatcggttcaatcattaaatgcggtaaatccgcctgacgtcgaattgtgcgggtagcgatgccataagccagcgaaaccacaaagaaaaaaagaatgattagtggcacgatacctttaataaagggtgatggcatcacggtgtgattaatcggatcgcgcaatatcccgttttccgggatcaccatcagcgcgatcgcagcaataaaaagtagcgatacgacacctgctatgcgtaaaccaaaacgctgactttcggtcaatgtctgcagtttctcatcgctgtttccctgccattgacctaaccgtggctcgatgattttgtcggttatcaagccgccaacaatcgtcagtacgactacggagctggccataaaataccagttatcaattacactgacgtgcatttgcggattgaacgcagccgccgcttccgtgctgatccccgacagcaacacgtcggttgtgacaatcagtaaattagccgtaaagccgcaacctacgcctgcaatggcagccagtaaacctgcaactggatgcctgcccaccgccagaaaaatcagcgcacccatcggtggcatgatcactaacgccgcatcggaagaaatgtggctgaaaaaagcaataaacagcaccatataactggtgtagcgggcattaacatgcgatgccattttaaccattagcgctggcagtaagccgacgcgctccgctaggccggcacctaaaaccagcgccaggatcgctccaagtggagcaaaaccgctaaagtttttaatcacattgggtaaaaaccagtgtaatccttccacactgagcaggtttttcaccaccaccggcgtaccatcggtcgggtttttcgcactgacgccaaaggctgacaaaattgccgtcgtcaccatgagtacgattatcaaatagataaagagcaaaaaaggatggggaaccttgttaccaattctttcgacccagccatagagcttcccggattgggaggacgacggtatggatgacatactcatgggcattcctcggttgttgtgtttgcgttgttgttgttattttaaaggtgacggtgtcacgtttttcgggatagggcagtgatacggttgcgtgtccgtaacttgctgatgctcttgttggcattcttgcaatagccctgaatcaatgaagagattgactgtggttgctgccatagttttcgccgccagcagcattcctttatgagcaatagatgttcgcccctggctaaccagttgccacgtatgtagcggtgtaccgacggcaaaacaggggctgaaacactgggcaacaggcagtttccaactgacgtcgccgacatcagtcgatgccgcaagcacgttatcggtggcggcatatggagcgacctcattcgccagtaccgtttcacgatgacgtagtgcaaaagccttgccgttttcgccaccggttgcggcgatattattcagactgttttgccgatcgttgggggtgagcgtagcctgaatttgtttcgcaaaagccagttcttcggagttccattccggggtaccaaaatgggatagggcatggtacatggcattttctaaggtgcgattcgggagataactggaacaggctttgtcgaagcggcattcaaccgtggtttcggtcatcaatgccgcaccttcggcgattttggcgacccgatcataaatatgctgcacgtcggtcatttcgggggcgcggataagataaagcacttctgcctgcgcctggaccacgttgggcgagatcccgccgctatttgtgatggcatagtgtacgcgcgctttttcaataatatgttcgttgaggaagttggtgccagtggtcatcaacgttacggcatcaagggcgctgcgtcccaaatgaggggaattcgcggcatgtgctgcgatccctttaaagcaccatgatgcctgaatgtttgccagcgtgcgggtattgaacatgccggcaaaggcttccgggtgccaggtgagtgccgcatccacatcatcaaataccccctcgcggaccatgaacgttttacccgagccgccttcttcgccaggacaaccataaaagcgcactgtgccgccttgcccatattgttccagccatttcttgacggctattgcagcggcaaaggcggcggttcccagcaaattgtgtccgcaaccgtgaccattttcaccgggcgtcgcggatgtaggttgcgcgcaaccagcttgctgacttaaacctgccagggcgtcatattctcccagcagggcgataaccggtttgccttgaccaaacgaagcaataaatgcatttgggatattgcctacgttgcgggtaacggtgaagcttgcagattccagcgccgaagccagatgctccgctgaccagaactcttcaaaacgtgtttctggatgatcccagatttgatcggcaatatcggtataacgttggcgatcggcttcaatcgcatcgtcgataaaacgatagatttcctgcatcagatacctcgcgtccagggaaaattgagcgcggtgcgcgccagcgtttcgacggcaatagcgagaacctgctcgtcaaaatcgaatttttcgttgtgatgacctgccgccagctgtgtgccaaacaccacgtaggaggcttgcccttgatgttgctgcacgcgggccatcattaatgtggcatcttcggaacccgcaggcgcttcaacacgttcaatggcctgattgacccccgcgacctgagccgcctgactttgcaaccatgcgacccattgcggcgaaggagaactggcggtagctgcacccatcagacgagtttcaacgccgacaccatacatggttgctgcgccctgaatcgcttgttgtgcacggtcaaaaacatattgattaatgacgtcgctggccccgcgtgtttccactttcagcaacgccgaggcaggaacaacgttacggccgcttcctgcctgcataacgcccacgtttactctggaagctccttcgctgtgcggggcgattgcatgcagtgcaagagttgcttgtgctgccgccaacaaggcattgtgaccgtcttctggttttgcgcctgcgtgagcggcggtaccggtgaagtgcgcgtcaaatttggtggttgccataaaattatcactgtcgcacaccacggtgcccgcaggtacgccagtgccaatgtgcacggcagtaaaataatcaacatcatctacgacacctgcatcgaccatcgcccgcgcgccacgcgtaccttcctctgcaggctgaaaaatcagtttgatgacgccatgtagtccggactcgaattgtttaagggtatgcgccagcccaagcccaatggcggtatgtccatcatgaccacaggcatgcatcattccggcgttacatgacgcaaaaccgtcgcggtaggggcgatggctgacatcctgctcttcactgagatccagcgcgtccatatcgacacggaaagccatcaccggaccggggcgaccggtatccagggtggcgacgataccagtgaaaccaccttcaaaaaccgcaatccattgtgctagcgcaccctgttgacgagcgcgctcgaattcgcgttgtagagtgagttcatcaggtagtcccatccggctactttcattaactacttcgcggcccagcgccagtgaatagccgagctgctgcaattcttccgcaacaagggtggcagtgcggaattccacccagccagactctgcatagtgatgaaaatcacgtcgccagtgcgataattttggggcaagcgaattaacaaattgattcaaagactccataacctttcccgtcatcagtaaaaagtgtgacccggttcacgtagcgatagtttttacttatcactaactgatttttcacagttttaaccgttcataaattaccctgacacaatcatctgcattaaagtagatgccagtttctttggtctgataaataacggttatcggtggcgtcatgacttttcaggtaaaaattcatcaaattcgtgcttttgttgaagtggctcgtcagggcagcattcgcggagcgagccgaatgttgaatatgtcgcaaccggcactgagtaaatctattcaggagctggaagaaggattagcggcgcaactcttttttcgccgtagtaaaggcgtgacgttaactgatgccggtgaaagtttttatcagcacgccagtcttattcttgaagagctgcgcgcagcgcaagaggaaattcgccaacgacaagggcaactggcagggcagattaatatcggcatgggggccagtatttcccgcagtctgatgccagctgtcatatctcgtttcatcagcagcatccgcaggtaaaagtacgcattatggaagggcaactggtgtcgatgattaatgaattgcgtcagggagaattggatttcaccatcaatacctattatcagggaccgtacgaccacgaatttacttttgagaaattactggaaaagcaattcgcgatcttttgccgcccgggacaccccgccattggtgcccgttcgatcaaacagttactggattacagctggacaatgccgacgccacacggcagttactacaaacagttgagtgaattgcttgacgatcaggcgcaaacgccacaggtcggtgtagtctgcgagacgttctcagcctgtatcagtctggtggcaaaaagcgattttctcagcatactgcctgaagaaatgggctgcgatcccttgcacggacaggggctggtgatgttgccggttagcgaaattttaccgaaagcggcctattatttgattcagcggcgtgatagtcgccagacaccactgaccgcgtcattaatcacgcaattccggcgagaatgcggctatctgcaaagttaaacctgcataaaaaaatagagtctgtcgacatccgccagactctacagtacacacagcagtgcatccgcgtcttaagtccggcattgtctcctctgcgccggtgactgtgttataacggttttaacctttagttgccaattttcttcagtgacagatttcacgaaaatataagttacattattaatatcgtgaatgaataatcatgcataagcattttgcttaaaatatcggcaatatttggaacttattactggaattttgggtaatacgttgttggaccgacccggtctggttatcatatcgcgctcttaattgcgggaggatgtaacatgaaccttgacgacaaatcgctgtttcttgacgccatggaagatgtccagccgctgaaacgtgctaccgatgtccactggcatccaacgcgtaaccaacgtgcgccgcagcgtatcgacacgctgcagcttgataatttcctcaccaccggatttctcgacatcatcccactaagtcagccgctggagtttcggcgggaagggttgcaacatggggtgctggataagctgcgcagtggtaaatatccgcaacaggcgagcctgaatcttttgcgccagccggtggaagagtgccgcaaaatgatgttcagtttcattcaacaagccatggctgatggtttgcgtaacgtgctgattattcatggcaaaggacgggatgataaatcgcatgccaatattgtccgcagctatgtggcgcgctggctgaccgaatttgatgatgttcaggcatattgcaccgcgctaccgcatcatggcggcagcggggcgtgttacgtcgcactacgtaaaacggcgcaggcgaagcaagaaaactgggagcgccacgctaagcgcagtcgttgatctcgagacgcatccgcggcttatgccgccagcacgcggttgcgaccatcatttttcgcccgatacaaagcatcatcaacgcgtttaaacagttcatcgatgctttcatttccttcgtgatgcgccacaccaatgctgacggtaaagcgtggtaagcccgaaatactcacttttgccacgcttacgcggatagtttcagccagcgaaagcgcggtatccagtggggttcttggtagcaataagacaaactcttcgcctccccaacgaaacaccaaatcgcctttgcgagcgcaactttcgagggtgcgggcgagggcgcataacacctcatcacctttagaatgcccatagagatcgttaatgtgtttaaaacgatcggtgtcgatgagcaacaagctgtaatcctgagcgatggcgagatgctgcatttggcctggttccgtaatgtgataaaactgtcgccgattcagtaatccggtcatcgcgtcatggtgagcagcatgttccagctgctcctccagccgtttttgctcagtaatatcatgcacaatacataacatgagcttgtcgccataaatttcaatcggtccggcataggtctgcacatgacgagtagatccatccgccagtttatgaacaaaattcaaaggtttatgaccgccgggtaaatgcgaaatttcatgcatgataggcatgacgcgacgcccgagcatatttatttcccaggtatgtttctggcacatcgtttcatggttataaccatagaaattgagcgcggcgaggttagcatcgacgatttgtccatctcgtgacgggtcaatcaacaacattggtgcagagttagtcagaaaaaagcgcgcataaaaaccttgttttttgcgctgataatttgccgagcgactggcttttaaccccagcgttgccggcgcttcgataccttcgaaaataatcaccggttctgtttctgtcagctctcgcaaaacaagccgacagcttaatgctgtttcctcttctttacgctgaacagtgaggatttcgataatatcgtgttggttttgcagatcggagaggtatttcggcagttctttttgtgaggagacggaatagggaccggttcgtagctgactaaacgtgaggtcttgcatcaacagtcgcgccgcgctattggcataaattaactgttcctcaaagggcgaaacgatccagacaggactggtgagtaagtccagggtattgaagttgtgcgtaatcattgagatcccattatttttatcaatttttgttgctatccgatcgcaaaaaagccacgtcatatgatcagataattctgataatgatagacgctatttaacacttcacacggtttgtatacggaaaagcattttgctttttgtattcaatttagacagaattttattaatcatttcagggtaatggggtgatgagatgttgcgtaacagggccagaaggctagactacaaaataatgcgttgatgatggaggcactgtggaagcgattaagggatcggacgttaatgtcccggatgcagtatttgcctggatgctggatggtagaggcggcgttaaaccgctggaaaatacagatgtgattgatgaagcgcatccctgctggctccaccttaattatgtacaccatgatagcgcccaatggctggcgacaacaccgctgcttcccaataacgtacgtgatgcgctggcgggcgagagcacacggccccgagtcagccgtctcggtgaaggcacgcttattacattgcgctgtataaacggcagcaccgatgaacgccccgatcaactggtcgccatgcgtgtatatatggacgggcggttaattgtttcgacccgacaacgcaaagtgctggcgctggacgatgtggtgagcgatctggaagagggcacgggtccgaccgattgcggagggtggctggtggatgtgtgcgatgcgttgaccgatcattccagcgaatttatcgagcagctgcacgataaaattatcgaccttgaagataatctccttgatcagcaaattccaccgcgtggattcctggctctgctgcgcaaacaattaatcgtgatgcgtcgctatatggcaccgcaacgtgatgtttatgctcgtcttgccagtgaacgtttgccgtggatgagcgatgaccaacgccgtcggatgcaggatattgccgatcgccttgggcgcggtcttgacgaaatcgacgcctgtatagcacggactggcgtgatggcggatgaaatcgctcaggtgatgcaggaaaatttagctcgtcgtacctatacaatgtcattgatggcaatggtctttttacccagtacctttctgacagggttatttggcgtcaaccttggtgggatccctggcggcgggtggcaattcggattttcaattttttgtattctgttagttgttcttattggtggtgttgctttatggttgcaccgtagtaaatggttgtaacaaaagcaatttttccggctgtctgtatacaaaaacgccgcaaagtttgagcgaagtcaataaactctctacccattcagggcaatatctcccttgcaggtgaatgcaacgtcaagcgatgggcgttgcgctccatattgtcttacttccttttttgaattactgcatagcacaattgattcgtacgacgccgactttgatgagtcggctttttttgcctgttatttatcagcgtctaccctttaagagtccacccaatgaccggagggaaatatgacgacacttatttatttgcaaattcctgtccctgaaccgattcctggcgatcctgttccagtgcccgatccgatccctcgcccgcaacccatgcctgacccaccacctgatgaagaaccgattaaattgtcgcatcgtgagcgtagatctgcgaggatacgcgcctgctaactttgcgtcgatgaccacgagaatagattgtgaccgctttttctaccctgaatgttttgcctcccgcccaactcacgaaccttaatgagttgggttatttaaccatgacgccggtgcaggccgccgcgcttccggcgatccttgccggaaaagatgttcgcgtgcaggcgaaaaccggcagcggcaaaacggcggcttttggcctcggcttgttacagcaaattgatgcgtcgctatttcaaacccaggctttagtgctgtgtcctacgcgtgaactggcggatcaggtggcaggtgaattgcgtcggctggcgcgttttctcccaaataccaaaattttgacgttgtgcggtggtcaaccgttcggtatgcagcgtgattcgttgcaacatgcgccgcatattatcgtggcaacgccgggtcgtttgctggctcacttgcaaaaaggcacgatatcactggatgcgctgaatactttggtgatggatgaggccgaccgcatgctggatatgggatttagcgatgccattgatgatgtcatccgttttgcgccagcatctcgacagacgcttctgttttctgcaacctggccggaagccatcgccgcaatcagcggacgagtgcaacgcgatcctttggcgattgaaattgactcaacagatgctttgccacccattgaacaacaattttatgagacatccagtaaaggcaaaattcctctgttgcaacggttattaagcttgcatcagccatcctcttgtgtggtgttttgcaataccaaaaaagattgccaggctgtctgcgacgcgctgaatgaagtagggcaaagtgcattgtcgttacacggcgatctggaacaacgcgatcgcgatcagaccctggtacgttttgctaacggtagcgcccgtgtactggttgcgactgatgttgctgcgcgtggtctggatattaaatcgcttgagctggtggtgaactttgagctggcgtgggaccctgaagttcatgtacatcgcatcggtcgtacagctcgtgcaggaaatagcggtctggcgatcagtttctgtgctccggaagaagcacagcgggccaatatcatttctgacatgttgcagataaaacttaactggcaaacgccgccagctaatagttccattttgccgctggaagcagaaatggcaacgttgtgtatcgatggcgggaaaaaagccaaaatgcgcccgggtgatgtattaggtgcgctgacaggagacatcgggcttgatggcgtagatattggcaaaatcgccgtgcatccggcgcatgtctatgtcgcggtgcgtcaggctgttgctcataaagcatggaaacagttacagggcgggaagattaaaggaaaaacgtgccgggtgcggttattaaaataatgaaatgttgaattgccgggtgcaagagtaaacatcttatgcgggattgccggatgcgacgctggccgcgtcttatccggcctccataagagtagcccgatacgcttgcgcatcgggcgctatcctggttatttcacttcaaccacattcagccgtaactcatccaactgattttcatcttcttctggctgccagcccaccggttgtagtgggatctcttcgcgatcaaacgccagatcacccccgttaaccacttcagaaccgtgggtaatgcctttgaaatcgaacaggttggtatcgcacagatgcgacggcaccacattctgcatcgcgctgaacatcgtctcgatacgccctggataacgtttatcccagtcacgcaacatgtcagcaatcacctgacgttgcaggttaggctgtgaaccgcacaggttgcacggaataatcgggaacgcttttgcatcggcaaatcgctgaatatctttctcgcggcagtaggccagcggacgaataacgatatgtttgccatcatcgctcatcagtttcggaggcatacctttcatcttgccgccgtagaacatatttaagaacaacgtttgcaggatatcgtcacgatggtgacccaacgcgatcttcgtcgcccccagttccgttgcggtacgataaaggataccgcgacgaaggcgagaacacagtgagcaagtggttttgccctctggaatcttctctttcacgataccgtaagtattctcttcaacaatcttgtactcaacgcccagcttttcaagatactcgggcagaacgtgttccgggaagcccggttgcttttgatcgaggttaacagccaccagcgaaaaattgattggcgcgctttgctgcaaattgcgcagaatctccagcatggtatagctgtctttacccccggagaggcaaaccatgatgcgatcgccttcttcaatcatattgaagtcagcaatggcttcgcccacgttacgacgcagacgtttttgtaatttgttcaggttgtattgttctttcttactaatttcttgattttgcgacatttaaaagcgactcaattcgttatatggcatcagaagagtatgcgtcatgccggaacgcccagcataagaaatctgatataaaaactgtggcgtgtatggtacggattagaggggaaaatgtcagcacatttgcgaaatgaatcaaaaagcccgcagcaatgtgcgggcgttagtgtcagcgcacaaccagcacggagcactctgcgtgacgcactacagctgcggcgttggaaccgagcagataagtggtgatatccggtcgatgggaagcaatgatgatcatatgagcggggatcttcttcgccatttccagaatgcggtctttgggcgagccttcctcaacatggacatgcactctgtcggttggcagtttaaattttttaatgatctcttccagttgcgatttggcttccgctttcaggtcatccattgccggtaattctgcggaatacgctaaacccagagaggcatagtagggcagtgaaggtattaccgtcaggaaatgaacctctgcatcatcaatctttgcctctgcctcaacgtggctaatcacgcgttgagttaattctgaatcggaaatatcgatagggacaagaatcgttctgttcataaaacctcctgttttagtatccgcataaagtgtaacgccagatgacactttttgtgtaatgacggagttcacatttttaatttagatcaaaggaggaagaataagcagaaaaagcccgccataacagcgggcaggaggatttagaactgataaaccagacctaaagcgacaatatcatcggtagagatgccattggcagcgtagaaactgtcatcttcatccaacaggttgattttatagtcaacataagtggacatgtttttattgaaatagtaagtcgcgccaacatcggcgtatttaaccagatctttatcatcaacacctgccgggttgtctgcaccaccggcagcgtgcaggtcacggcctttagacatcaggaaagagactgccggacgcagaccaaaatcaaactggtactgtgcagtgacttcaaagttctgggttttgtttgcaacagcataatcgctgtcgccaaacggggtcatattacgcgtttctgaatacatggttgccaggtaaatattgttagcatcgtattttagcccagcagtccacgcgtctgctttatcaccacccgccgcagtatggttaacctgatcattggtgcggtcagaagaggtgtatgccgcaccagcgctaaagcccatgcctaaatcatatgttgtggaaagaccccagccgtcaccgttttcatggcgaacatcacgtccgttgttggtgccttcctgaccattactggcaccttcgttgttaccttgatactgcaccgcgaagttcagaccatttaccagaccgaagaaatcagtattacgataagtcgcgacgccattggctcgaccagtcataaagttgtctgcattggtataagagtcaccgccaaattcaggcagcatatcggtccagccttcgatgtcgtacattacgccataattacgtccgtaatcgaaagaaccgtaatctgcaaatttcagcccggcaaatgccagacgggtccatgactggttttttgaagattcagtgttgtttgcctgaatattgtattcccattgaccgtagccagtgagttgatcgttaatttgggtttcgcctttaaaacccagacgcgcatagctctggtcgccatctttcgccgaattatcagaaaaataatgcaggccatcaactttgccatacagatctaatttgttgccgtctttattataaacttcggctgcatgtgcagcacctgcggcgagcagggcaggaattaaaagtgccagtactttgcttttcattgaataaatcctttagttattttatttgccttttatccccatttcggggagtgaaaacatcctaaaggagaagttcagttagccgataaatatcatttgttacgccttaagtaaaaccttaatcaaataattcctctgaaatgataataagtttggtgaatgtatcgaagataatacatacaaaataaaanttatacttttaattttctatacgttattctgcgcgggttatatgcctttattgtcacagattttattttctgttgggccattgcattgccactgattttccaacatataaaaagacaagcccgaacagtcgtccgggctttttttttagaattggataatccttatccagagcatttaatcggtgttgcttttttccgcttttccggccatttgtgccaggaagtcatagcgtttttgcaaatcagctgcagcatctttccataactgttctgccacttctggctgctgcgaattcagacgacggaaacgttgctcgtgaagtaacgtttcttccagtgcttctgacggcgggcgtgaatccagcgccagcggcagtttgccttcatcggcacgacgaggatcgaagcgatatagcggccagaagccggtagctgtgagttggcgcatctggtcatggctgagtgccagatcgtaaccatgctcttcacacgggctataagcaatgatcagcgatggccccggatacgcttccgcttcctgaatcgctttcaccgtctggttcagctgcgcgccgagagaaatctgcgccacataaacatgaccgtacatcatcatactgacgccaagatctttacgcgctttacgtttgccgtgctcgccgaacttagttactgcacccagcggtgtcgctttcgacgcctgaccaccggtgttggaatagcattgcgtatccagcaccagaatgttgacgttttccgtcaaactcaatacatgatccagacccccaaagccgatatcgtaagcccagccgtcgccaccaatcagccagattgatttttccaccagtgcatctgcgtcacgcagcagttcatgtgcttcggcaacatcgttgagttgctggcgtaaagctgcgacctgttctcgacgaacctctggcgtagcgtctgatttcaacgctgtcagtaattccgccgggattttatcggcaaattgatccagcagacgcagcacgcggacacggtgttgatcgaccgtcaggcggaaaccaaggccaaattcggcattatcttcaaatagagagttcgcccatgccggcccacgaccgttggcatcggtggtatacggtgtagagggcaggttaccgccataaattgaagaacagccggtggcgttagcgatcaacatccggtcgccatagagctgagtcagcaatttaatatacggcgtctcgccacaaccggagcaagcacctgaatattcaaacagcggtgtaatcagctgcgatgtacgaatatcaatacgttccagtttgctacggtcgatttctggcaggttgaggaagaaatcgtaattgattttctcttcttcgacatgttccaggcgagacatcatattgatggctttaatctctggattctgacggtctttcgccgggcaaacttcgacgcacaggttacaaccggtgcaatcttccggtgccacctgcaagacatatttctgcccgcgcatatcacgcgatttcacatccagcgaatgcaggctggcaggggcgttttccatcgcttcaggcggcaccacttttgcgcgaatagctgagtgtgggcaagcggcaacgcagtggttacattgggtacagagttcctctttccagatggggatctcttcggcgatattgcgtttttcccagcgagtggtgcccatcggccaggtgccgtctggcggcagcgccgaaacggggagggcatcaccaagccctgcgagcatcgctgcggttacggttttcacgaaatcaggggcggcatcggaaaccactggcggtcgattggcgctgtgcggatttaccggttgcaacggaacttcttctacggattcacgcgccagcgccagagcctgccagttgcgttccaccagatcctggcctttgctactgtaacttttggcaatcgcaccctgcaattctgcgagggcgctatcgccaggcagaatttgcgtcagatggaaaaaagccatctgcatgacggtattaatacgggccgccaggccacattcgcgggcgattttcgccgcgttaatcacatagaagcgcgcttttttctgatttagcacggcctgaacttcctgcggcaagcgcgaccacacttcatctgcgctgtacggcgtgttgagcaggaaaatgccgccaggttttaaacgctcagccatctgatatttatcgataaactgcaactggtggcagccaacaaaatcagcctgggaaatgagataagcggaacgaatcggctgttcgctcacgcgaaggtgagaaaccgtcaggccgcccgcctttttggagtcgtaaacaaaatagccctgtgcgtaccacggcgtggaattaccgataatcttgatattgtttttggtcgcggaaacgctgccatcactaccaaggccataaaacaaggcttccagtttcgccgagtttggcagggtgttttccggcaacggcagtgacagattggtcacatcatcgtaaataccaaccgtaaagcgcgctttcggtttagccgcgttgagctcggcaaataccgccagtacacagtccgggccaaattctttggatgaaagaccatagcgcccaccaatgacacggggcagagtttcgcgctcgccattattaaaggcttctgccagtgcggtcattacatccagatagagcggttctgcctgggcaccgggttctttggttctgtccagtaccgccacgctgcgtacggatcccggcagagcttgcagcaagtgtttggcggagaagggacggtacaggcgaactttcagcacgccaactttttcgccacgggttagcaattcatcaaccacttcttcacaggtgccaatggcagagcccatcaggataatcacccgttccgcttgcggatgcccgtaatattcaaacggctgatactgacgacctgtcgcggcagagaaatcattcatcgcctgttcaacatggtcatagaccgcgttgtaccatgggttggtggcttcgcgagactggaaataagtgtcaggattggcggacgtaccgcggatcaccggatgttccgggttgagtgcccgggcgcgatgagcatcaatttcgacctgcggcatgagatcaagaatcgtgtcatcggccagcgggacaattttattgatttcgtgggacgtgcggaaaccatcaaagaaatgaataaatggcacgcggcttttcagcgtcgcgatttgcgaaatgagagcaaagtcttgcgcttcctggacgtttgctgcacacaacatcgcgcaacccgtctggcgcaccgccataacgtcggaatgatcgccaaaaatagagagtgcatgtgtggcaacggtacgtgccgctacatgcaggacaaacggtgttagttcgcctgccagtttgtacagcgtcgggatcatcagcagcaaaccctgcgatgacgtaaacgatgttgaaagggcacccgtctgcaaagcgccatgcacggtagcgatagcacccgcttccgactgcatttcaaccacgcgtggtgtgtctccccaaacgttctttaagccgtttccggcccaggcatcagcctgttctgccatcgtggaactgggggtaatagggtagatggcgataacttcactggtgcgaaatgcgaccgaagcaaccgcgccattaccgtcaatagtaatcatatgacacccttacattgcgcaaatgaggggcgcacgaaattgctgcgcgcccagtagtaatctttcaattttagcaaatggctttcttctgcattttcgcttttgtgtcccccacatcagcgtaatgaatgttttgatcaaacagagggcaaaaaaatagccataaaaaagtaaaaatgcggggcaacgcgcaggacagctctcgacgccgccctctgtgctgcctattatttatggcggtgtcgtttggcttgaagatcagaggaagaaaagatgcgagcagcgttttgggtagggtgtgccgctttattgttgtcggcgtgtagtagtgagcctgttcagcaggcgactgcggcgcacgtagcgccaggtttaaaagcgtcgatgtccagtagtggagaagcaaattgtgcaatgatcggcggttcgctttctgttgcccgtcaactggatggtacggcgattgggatgtgtgcattacccaacggcaaacgctgtagtgaacagtcacttgccgccgggagctgtggcagctattaattcattaaatccgccagcttataagttaatgtctgtttcgcggtcgccagcgttaactggttcgcggtcagatccacttgtgcaccttctttcagcatttcgctaatggtgttatcgagttcattaagctgcgggttagcgcacatcatacgggtcattgccagccctttggctgtcagttcaccattagacagtttgccttcaccgctaaagcggttacacatgctgccggaaatcatcattttttcaccaaagctgatttctggcggatttttatcgctggtcacgggcttaccgtttacgctttccagcacaaagcgatgatgctgtaactgttctggcgttacagcaattttgtcactacttacacatcccgccatcagcaggcttagcgcaacaagcgcggctactttcttcattgtggttctcaattacagtttctgactcagggctattttaagaatagaggatgaaaggtctttggggattatctgaataagctcccctggaatgcaggggagcggcaagattaaaccagttcgttcgggcaggtttcgcctttttccagattgcttaagttttgcagcgtagtctgagaaatactggtcagagcttctgctgtcaggaatgcctgatgcccggtaaacagcacgttgtggcaggcagacaggcgacggaatacgtcatcctgaattacgtcgttggatttatcttcaaagaacagatcgcgttcgttctcatatacgtccatacccaacgaaccaattttctgatttttcagcgcttcaattgccgcctgagaatcaatcaatgcaccgcgactggtattgacgatcatcacgccatttttcatctgatcgaaggcggcttcgttcaacagatggtagttttccggtgtcagcgggcagtgcagagagataacgtctgattcagagaacagggttggcagatcgacatactccacaccgagttccagcgccgccgcacttggatacggatcgaacgccagcagacgcataccaaaacctttcagaatgcgcagcatcgccacaccgattttaccggtaccgataacgcctgccgttttgccatacatagtaaagccggtcagaccttccagagagaagttagcgtcacgggtacgctgatacgcgcggtgaatacggcggttcagcgtcatcatcataccgatggcgtgttcagcaacggcctctggatcataggctggaacacggactactttcagccccagttcttttgccgcgtcaaggtcgacgttattgaaaccggcacagcgcagggcgatatatttaacgccgtgctttttcagctcttccagcaccgggcggctgccgtcatcgtttacgaaaatacataccgcttcgcagccattggcagttttagcggttttttccgtcagcagaaagtcaaaaaattccagctcaaagccaaaggactcgttcacctgttgcaggtacttcttgtcgtactgttttgtgctataaacggcgagtttcataagactttctccagtgatgttgaatcacatttaagctactaaaaatattttacaaaatttcaaatataattgaaagctatggcgatattgaaaaattcatcaacaactatgcttagtgtaggcgcaaccttcaactgaacggttaaacatgccacaatacccgtattgaatgcttaatttttcgctaaatcaggatattaactacccatgctgggtaaatataaagccgttctcgcgctgttattactgattattcttgtgccgttgacgctgctgatgacgctcgggctgtgggttcccacgctggcgggcatctggctaccgctcgggacacgtattgcattagatgaaagcccacgcattacgcgtaaaggtttaatcattcccgatctccgttatctggtgggagattgtcagcttgcgcatatcaccaacgccagcctttcacatcccagccgctggttattgaacgtcggcatggtagaacttgattctgcttgtctggcgaaattgccgcagacggagcaatcgccagctgctccaaaaaccctcgcgcagtggcagtccatgctgcctaacacctggatcaatatcgataaactgattttttctccctggcaggaatggcagggaaaactctctctcgcattaacctctgatatccagcaactgcgttatcagggcgaaaaagttaaatttcaaggccagctgaaagggcaacaacttacagtcagcgaactggatgtcgtcgcgtttgaaaatcagccgccggttaaactggtgggggaatttactatgccgctcgtgccggatggacttcctgtaagtgggcatgctactgcgacgttaaacttgccgcaggaaccgtcactggtggatgcagagctggactggcaggaaaatagcgggcaattgattgtgctggcacgggataacggcgatccgttgctcgatttgccgtggcaaattactcgtcaacaattgaccgtaagcgatggtcgctggagttggccgtatgcaggttttcctttgagtggccgactgggtgtcaaagtcgacaactggcaggcagggcttgagaacgctctgatcagcggacgactgagtgtgctgacccaggggcaagcgggtaaaggcaacgcggtgctaaattttggcccaggaaaattaagcatggataacagccagctgcctctgcagctgaccggtgaagcgaaacaggcggacctcattttatatgcccgcttacccgcgcagctaagtggaagtctgactgacccaacgctggcctttgagccaggcgcgttattacgttcgaagggaagagtcatcgattcgctggacatcgatgaaatccgctggcctttagcgggtgtaaaagtcacccaacgtggtgttgacggacgtttgcaggccattttgcaggcgcatgaaaatgaactgggcgatttcgtgctgcatatggatggtctggcgaatgattttctccctgacgctggccgctggcagtggcgctactggggaaaagggagttttacaccgatgaatgccacctgggatgtcgcaggaaaaggtgagtggcatgacagcacgattacgctgaccgatctctccaccggtttcgaccagttacaatacggtacgatgacggtagaaaagccgcgattaattctcgacaagcccgtcgtctgggtacgtgacgcacagcatccctccttcagcggcgcgctgtcactggacgccgggcaaacgctgttcactggcggcagtgtgttaccgccatcaaccttaaaatttagcgtcgatgggcgcgatccgacgtatttcctctttaaaggcgatttacatgctggtgagattggcccggttcgggtaaatggtcgctgggacggtattcgtctgcgcggtaacgcctggtggccaaaacaatcactgactgtattccagccgctggtgccacccgactggaagatgaacttacgcgatggtgaactgtatgctcaggttgcattttctgctgcgccggaacaaggattccgcgcgggagggcacggcgtgttgaaaggcggtagtgcctggatgccagataatcaggttaacggtgtcgattttgtcctgcctttccgttttgccgatggagcctggcatctggggactcgcggccccgttacgttgcgaattgccgaagtgattaatctggtgacagcgaaaaatattacggctgatttgcaagggcgttatccgtggactgaagaagaacccttgctgttgactgatgttagcgtcgatgtgttaggcggtaacgtactgatgaaacaattacgtatgccgcaacatgacccggcgctgttgcggctgaataatctctcatccagcgaactggttagcgccgtcaatccgaaacaattcgccatgtccggggcatttagtggtgcattgccattatggctaaacaacgaaaaatggatagtgaaagatggttggctggcaaatagcgggccaatgaccttgcggctggataaagacaccgcagatgcggtggtgaaagacaatatgactgcgggttcagcaattaactggttgcgctatatggaaattagccggtcatcgacaaaaattaacttagataatctcggtttattaaccatgcaggccaacattacaggtaccagtcgcgttgatggtaaaagcggtacggtaaaccttaattaccatcatgaagagaatatttttacgctgtggcgcagtttacgctttggcgataatctccaggcatggttggagcagaacgcacgtctgccgggaaatgactgtccgcaaggaaaagagtgtgaggaaaaacaatgaaaattttactggctgcgttgacgtcatcttttatgctggttggctgtacgcctcgcattgaagtcgctgcacctaaggaaccgatcactatcaatatgaacgttaaaattgagcatgagatcatcatcaaggcagacaaagatgtcgaagagctgcttgaaactcgtagcgatcttttctgaggcgatgatgaagaaaacattacttctttgtgcgtttcttgttgggctggtaagcagcaatgtaatggcattgactctggatgaagccagaactcaggggcgggtaggtgaaacattttatggttatctggttgcgctgaaaacggatgctgaaacagagaaattagtaaccgacattaatgccgaacgtaaagcgagttaccaacaactggcaaagcaaaataatgtgtcggtagatgatatcgcgaaactcgccgggcaaaagctcgtagctcgggccaaaccgggggaatatgtacaagggataaacggtaaatgggtgcgaaaattttaatagcaaaaccgcaatatcgggataatgctacaggagaaagcgattgatctattttcctgaaacaaggtgaatattaaaaaactcctgttaaattgccttttgccctgaaaaatgcatagtcaaatatctgttttaactaattggcgttgcagtacatgcaacgcgaattagttagcggaatttacgccgatactcgcctggcgtcatcccaaagcgttgcttaaatactgttgaaaaatgactctggtcggaaaatccccaatgaaaaccaatgcctgccagtttttcatcatctgcggcatggcgaatcgcatcagcacaaaaatcgagacgacggttacgaatatattgcgcgaccaccaaacctttatcggcaaacattcggtacaaactacgtactgacatacctgtctctccggctatccactccgggcgtaatatctcttcgcgaatattatcgtctatcagcgtaaccactttttgaaactgacgttcacggcgaggttgaacagattcccgctgatgaagtaccgggcgcagcagacacaccatcgcctgtagcgcagcttcactttctgtttcagaaagtgccgggttattcatgctctcctgtaacaggcgatgactgagttgcaccatgggtaagtcagcgtccagtctttctgcgcagacaggtttttgatggggaaaatattgttccagcagagtgcgtggtaaaagtaatgaaatctgtttagaagactcctgccagtaaagcgaacaggggcgtgaggcatcgagtaacgtaatatcgccagcgccaatctgcacctgacgctcatcctgctccattattgcctgaccactaagctgaaaaacggtgtaaaaccaggcatcgtcgctgccttttatttcctgccaggtgcggtataaattcactccgttggttgtcacggtgctcagctttagtcctttggcaaaatgcgtttccagtacacccgtgtaacgctcagtcagcaggcgtccggtaaaatttccgcatacctgattgatttgggaaagccattgctgaaactcattatccactgcggggttcatggcacgttttcgctctgtgaaatgtatttttattgttgcatttgtgttgcaataaacgaagctaatgagcctgactataggaaataagtcttgtcaggcatagagacataagcggttattgtcacgatttgcggagcttgtcacagctgacaaagcgaatgtcacagcgaaaaaagtgacttttcttgtcgctgcgtacactgaaatcacactgggtaaataataaggaaaagtgatgacagagccgcatgtagcagtattaagccaggtccaacagtttctcgatcgtcaacacggtctttatattgatggtcgtccaggccccgcacaaagtgaaaaacggttggcgatctttgatccggccaccgggcaagaaattgcgtctactgctgatgccaacgaagcggatgtagataacgcagtcatgtctgcctggcgggcctttgtctcgcgtcgctgggccgggcgattacccgcagagcgtgaacgtattctgctacgttttgccgatctggtggaacagcacagtgaggagctggcgcaactggaaaccctggagcaaggcaagtcaattgccatttcccgtgcttttgaagtgggctgtacgctgaactggatgcgttataccgccgggttaacgaccaaaatcgcgggtaaaacgctggacttgtcgattcccttaccccagggggcgcgttatcaggcctggacgcgtaaagagccggttggcgtagtggcgggaattgtgccatggaactttccgttgatgattggtatgtggaaggtgatgccagcactggcagcaggctgttcaatcgtgattaagccttcggaaaccacgccactgacgatgttgcgcgtggcggaactggccagcgaggctggtatccctgatggcgtttttaatgtggtcaccgggtcaggtgctgtatgcggcgcggccctgacgtcacatcctcatgttgcgaaaatcagttttaccggttcaaccgcgacgggaaaaggtattgccagaactgctgctgatcacttaacgcgtgtaacgctggaactgggcggtaaaaacccggcaattgtattaaaagatgctgatccgcaatgggttattgaaggcttgatgaccggaagcttcctgaatcaagggcaagtatgcgccgccagttcgcgaatttatattgaagcgccgttgtttgacacgctggttagtggatttgagcaggcggtaaaatcgttgcaagtgggaccggggatgtcacctgttgcacagattaaccctgtggtttctcgtgcgcactgcgacaaagtgtgttcattcctcgacgatgcgcaggcacagcaagcagagctgattcgcgggtcgaatggaccagccggagaggggtattatgttgcgccaacgctggtggtaaatcccgatgctaaattgcgtttaactcgtgaagaggtgtttggtccggtggtaaacctggtgcgagtagcggatggagaagaggcgttacaactggcaaacgacacggaatatggcttaactgccagtgtctggacgcaaaatctctcccaggctctggaatatagcgatcgtttacaggcaggtacggtgtgggtaaacagccataccttaattgacgctaacttaccgtttggtgggatgaagcagtcaggaacgggccgtgattttggccccgactggctggacggttggtgtgaaactaagtcggtgtgtgtacggtattaatctggttcgctcataagtaaaaacggcacctggtgccgtttttttgtctgaaacaatcacttatctttcttcagcgcccctagcgttggcgtttcgtcaaagaagttccatggtttaagcagagtatgtacccattcggtcggcataatcggccactcttcggcacgggccacatgtgtggtgccggtggtcatccagataacagcgtcggtgttgtccagcgactcgttatccttactgtattgtccaagaccggtgtcatgagtggaacggttcggatatttgccttccgggaaacgctcgccagggtgataacgcgttacccagagctgcttgtccataaagcttaaacgatgatagatccactcgtccggcgcgaactgggcaccttttgctaccgggtgagtaccacctgcataaggaataatttgataggaaactggattgcccatgcgattctctttgttcaggttactcaacagacgaatcgtgcccggatcaaacttctgcgcggcatcctgttcattgccgatgttgtactgattaacttgcatggtactggtgcgtgggccaccggcagtattcggttttaccactgggtccatcgccaccaggctgttattctcgccatctacatccagatcgaggcggaaattataaatatgttggtgtgtagtacccacgatattgtgatcgataagcgtgccgtagcgcgtgtcatctttcgccgtctcatcgtgcatggttttcgctttaacacctttcaccgcttcgatgcccgtagcaccggcatcaatgccaatagtgccgttttcatggaagatccagtcaaaaatgtagtcatagttacccactgtactgatccagcgcaccactaactcccggcgttcggtactgacgttgggctggcccatttcctgatgcttatactcaggcccggcataacgttcaaataccgcgatagcgcgagggatctccatcggcacgccagtgtagtcggcgatggtttcattaaggagcactgcgttagacggggcatctttaccacgagcaattggtgaggttagcgtgcccataccgtagtcaccagagtccagatacgctttaaagtaccagccaatatcaggatcaccgtaaggcacaatcatgccgccgagagaaccttcgtacatgactttgcgtttggtgccattgtcgttataagtcacggtggagatcataggtccgacgcgcgagttcatgctgaggtgaaaatcccagttccgccagtgaatcatatcgccagtaatggtgtaatttttaccttcaggctcaatgatttgcataggcttaactgccggagcaacgcggtcacggccatcaaatgggcgtgcggtcattggcaccggaactaccgcaccttcttcaatcttaacgatttttttctgttctaaatcaacgaccgccaccaggttttcgatgggatgtgcccagtagttgccatcaccgacatcaagatagctgatgactttgagcaaccgggcatcttgtttcaggccatctttaccatcgaaataacctacggtcagcggcgtggtaatcactttcttcgcatcagtaataccgcgcttcttcacggcagcggcaaattcttcactgttgttaataatgttctgcacactggcgaaatcatccagcaacaccataccgtgggcgtctttaatgggttgccaggagagcagtttgttgttttgcagatccaccaccgcttcgatgatatgtttgccgtcgagcataatgacgtcggctttgcgcggctggtcaaccggtttgttttccagcgcaaacgcccagacagcttctttatctggcggtagcagggagatctcagtaaaacgggtattgggtttgaagtccgcggaagctttaacaatttcaacggcctgtttaatttcgtccgcagttagcgcattaagtgggtgagggcgcttttctacctgaaaggtttgatccagcccggactggaaaacatcgttaataaaggtgtcagaaacccaggccttattgtctttcatcactaccggtacttgcagtgccagaggctgaccattaacaattgctgtttgcgcaccaggcttcactttcacgtacgcgccatctttaatcagggtaaagatctgggcgtagtcgtcccactgcacatcggcaccaaattctttaagcgtttcatccattggcaccatatgcgcttcaccaccgtgggcaaataccggcgcttgccaggcgaaacttaaggcgactgccaacgccagggttgttttacgggcagaatacagagaggggcttcccattattaacctcgtcagatgttgtgttcttgttagcaaccgcgctctgtgggcggtttagtcaggttcacattatcagtactgatgcaaaggggattgcctgcacctgccaggttgtttggcaggtgtgccagcttttcatacagtgggtgccctgaaaatagatgtacacatcatgcataatgtgacaacgtcacaaaacttagtgaaataaaagggcaactattggccgttgcccttcattcaccgattaatcgacaaaatcaccgtgctgcctggccaccagcgtcagaattgaatacagcgccaccggggtttgatgctgattgaatacctctaccgcccattccaccacacctgttggtttttcttctgcgctacgctgttttttcagcgtcttgcgcttacaggtgagacgcacctggatggtatcgcctggctttacgggttcgataaaacgcaagctttccagcccgtagttagcaatgaccggaccaacaccggcatcgacaaacagacccgcagccgcagaaagcacaaaatacccatgcaccacccgctcaccgaaaatagattcggcagcagcaatcttatccatatgtgcatagaaatgatcgccgctgaggcaagcaaagttaacaatatcggcctctgtcattgtgcggcggggagtcaacaggctgtcgcctggttgtagctcctcaaaatatttgcggaacggatgaatacgatcttcttcgactttcgcaccgcgcacccactgtttgctgatagctgcaagcatcgtcggactaccctgaacagcggttcgctgcatgtaatgtttcaccgctcgtaaaccacctaattcttcaccgcctcctgcgcgaccaggcccaccatgtaccagttgtggcagtggggagccatgcccggtggattcttttgccgactcttcattgaggatctgaattcgcccatgcgtacgtgccgcgtcggcaataaactgacgcgcaatttgcggatcagccgtcaccagcgttcccgcaaggctaccgccgcctgcacaagccagttgcagagcatgttgctggttttgtgctggcattagcgttgcgacagggccaaaggcttctgttgcatgtaccgccggtgtttcatccggctgcggacagtacaataaggttggcgggaagaaggcacccgcagcagataaatccgcctgaccaccgaggcgaatctcgcatcctgcagccagcaatatgttcactttttcctgcacatcggcacgctgctcagcatttaccagtgcgcccattttcacgccttcctgagcaggatcaccgaccacgactttctgtaatcgcgcaaccagagcatcactgacagcattaaccaatgcctgcggcacaataatccgccggattgccgtacatttttgcccggcttttgtggtcatctcacgcacaacttcacgaataaacagcgcaaactccggttgatccggggtgacatcttcgcccagtacgcagcagttcagggaatcagcttccatagtgaaggggatagatttggcgacgatatttggctgaactcgcagcatctgtccggtcgccgctgaccccgtgaaagtcaccacatcctggctgtccagatgatccaacaagtcgccagcactaccgcagatcagactaattgcgccttcgggaacaagaccactatcgacaattgatttcaccatcgcctgagtcagttgggccgtcgcggtagctggtttgatgatggctggcattccgcccagccacgttggtgccagcttttccagcattccccagcaggggaagttaaaggcgttaatatgcactgccacgcctgactttgaggtcagtacatggcgcgcggcaaatccaccttctttcgataaggggatcaattcatcttccggccacagcgtatcgtcaggcagctcccggctaccgaggctggcgtaagtaaataacgtcccaatgccaccttcaatatcaacccaactgtctgcccgcgttgcgcctgtttgcgcagaaagagcatagaagcgctctttttcactcagcagatgtttagcgaccgctttaagcatcgccgcacgttcgataaaggtcatcgcgcggagggcgggggcacctttttcaatggcaaactggcgggcagccgccatatcaagaccttcactggtcacttcccataacgcctcgccgctaatagcgtggtgaatcaaacggctacggccccggccagactgccaggtaccggataagaaactggctaactgctgcatcgctactctccagatgtttcacatttctgttgctaatagttaaatcgcgaatcataaaaagcaaggggtcttttaacgaaatgttaactatgcgatctgtatagcaactgcggaaaacattaatgcactgataaataatgatttataaaaatagggtgcgaaatccgtcacagttcaaacatacaaaatttgtgattttagttaaccattgtgtaactttcataaaacaacgtgattcgtgtttttaattaattcacgaaaactggaatcgtaaaggtgatgacgtgacccaagaagaacgctttgagcaacggatagcccaggaaacggctatcgagccgcaggactggatgcccgatgcttaccgaaagacactgatccgccagattgggcagcatgcgcactccgagattgttggtatgttgcctgaaggtaactggatcactcgcgcaccaaccttgcggcgtaaagccattctgttggccaaagtgcaggatgaagccggtcatggtctgtatctctatagcgccgccgaaacactggctgcgccagagaagacatctaccaaaaaatgctcgacggacggatgaaatattcctccatctttaattatccgacattgagttgggctgatatcggtgttatcggctggctggtggatggcgcagcgatcgtcaatcaggtggcgttatgccgaacttcttatggcccgtatgccagagcaatggtgaaaatctgcaaagaagagagttttcaccagcgtcaggggtttgaagcctgcatggcactggcgcagggcagcgaagctcaaaagcagatgttgcaagacgccattaaccgtttctggtggccagccttaatgatgttcgggccaaacgatgataactcgccaaacagcgccagaagtctcgcctggaaaatcaaacgtttcaccaacgacgaactccgccagcgtttcgtggacaacaccgttccacaggttgaaatgctcggtatgaccgttcctgacccggatctgcattttgacactgaaagcggtcactaccgctttggtgagatcgactggcaggagtttaacgaagtaattaacggtcgcggaatttgtaatcaggagaggctcgacgccaaacgtaaagcctgggaagaaggtacctgggtacgggaagcagcgctggcccatgcacaaaaacaacttgcccgtaaggtcgcataaggagattcaaaatgagtaatgtttactggccgttatacgaagttttcgtgcgtggcaaacagggcttatcacaccgccatgttggcagtttacatgctgccgatgagcggatggcactggaaaatgcccgtgatgcttacacccgtcgtagcgaaggatgttcaatttgggtggtgaaggcgagtgaaattgttgcctcgcaaccggaagaacgcggtgaattttttgatccggctgaaagcaaggtctatcgccatccaacgttttacaccatccctgatggcattgagcacatgtgaggtcggaaatgaatcagttaacggcttacaccttgcgcctgggcgataactgtctggtgctctcccagcggttgggggaatggtgcggtcacgcaccggaactggaaatcgatctcgcactggcaaacattggcctcgatttattaggtcaggcacgtaacttcttatcgtatgccgctgaattagcgggagaaggtgatgaagataccctggccttcacccgagacgagcgccagttcagcaacttattgttggttgaacaaccaaacggcaattttgccgacaccattgcacgccagtatttcatcgatgcatggcatgtggcgctctttacccgtctgatggaaagccgtgatccgcaactggcggcgatttctgccaaagcaattaaagaagcgcgttatcacctgcgttttagtcgtggctggctggagcgactgggcaatggtactgacgtatcagggcaaaagatgcagcaggccatcgacaagttgtggcgttttactgccgaactgttcgatgccgacgagattgatattgcactgagtgaagagggtattgcggttgatccacgcactttacgcgcagcgtgggaagccgaagtttttgccggaatcaacgaagccacattgaacgtaccgcaagagcaggcgtatcgcactggcggtaaaaaaggactgcataccgaacaccttggacccatgctggcagaaatgcagtatctccagcgtgtcttgcccggtcagcaatggtaacagaggagatgggtatgcaacgtctggccaccattgcaccgccacaggttcatgagatatgggcgctactcagccagatcccggacccggagatcccggtgctgaccattaccgatttaggcatggtgcgtaatgtgacacagatgggagaaggatgggtgatcggctttacgccgacttattccggttgtccggcaacggaacatttgattggcgcgatacgtgaggcaatgacaacccacgggtttacccccgttcaggttgtgctgcaactcgacccggcatggaccaccgactggatgacccccgatgcccgtgagcgtctgcgacagtatggcattagcccgcccgccggacacagttgccatgcccatttgccgccagaagtacgttgcccgcgctgcgccagcgtccataccacacttatcagtgaatttggttccacggcctgcaaagcattgtaccgctgcgatagttgccgcgaacctttcgattatttcaaatgtatttgaggatgccatgacaacgtttcattccttaacagtggcaaaagtcgagccggaaacccgtgatgcggtgaccattacctttgcggtgccccagcctttgcaggaggcgtatcgctttcgccccggtcaacatttgaccttaaaagccagtcttgatggtgaagaattacgccgttgttactccatttgccgcagctacctgcctggcgaaattagtgtggcggtgaaagccattgaaggcggacgtttctcccgctatgcccgcgaacacatccgccagggtatgacgctggaggtcatggtgccgcaggggcatttcggctatcagccacaggccgaacgccagggccgctatctggctattgcagcaggatcaggtattacgccaatgctggcgattatcgccaccactttacaaaccgagcctgaaagtcagttcaccctgatctacggtaaccgtaccagccagagcatgatgtttcgccaggcactggcagacctgaaagacaaatatcctcagcgtttacagttgttgtgcattttcagtcaggaaaccctcgacagcgatctgcttcacgggcgtattgacggtgaaaaattacagtcacttggggcctcgctcattaattttcgtctttatgatgaggcatttatttgtggtccggcggcgatgatggatgagacggaagccgccttaaaagcactgggaatgccagataaaaccattcatctggagcggtttaatacgcctggcacgcgcgtcaaacgtagcgttaacgtgcaaagtgacggacaaaaagtgactgtacgtcaggatgggcgggatcgggaaatcgtgcttaatgccgacgatgaaagcattctcgatgcggcattgcgccagggggctgatctgccctatgcctgcaaaggcggcgtctgtgcgacctgcaaatgcaaagtgctgcgtggcaaagtggcgatggaaaccaattacagtctggaaccggatgaactggccgcaggttatgtgttgagttgccaggcactgccgctgaccagcgatgtggtggttgactttgacgcgaaggggatggcatgagcgaactgatcgtcagccgtcagcaacgagtattgttgctgacccttaaccgtcccgccgcacgtaatgcgctaaataatgccctgctgatgcaactggtaaatgaactggaagctgcggctaccgataccagcatttcggtctgtgtgattaccggtaatgcacgcttttttgccgctggggccgatctcaacgaaatggcagaaaaagatctcgcggccaccttaaacgatacacgtccgcagctatgggcgcgattgcaggcctttaataaaccacttatcgcagccgtcaatggttacgcgcttggggcgggttgcgaactggcattgttgtgcgatgtggtggttgccggagagaacgcgcgttttgggttgccggaaatcactctcggcatcatacctggcgcaggcggaacgcaacgtttaatccgtagtgtcggtaaatcgttagccagcaaaatggtgctgagcggagaaagtatcaccgctcagcaagcacagcaggccgggctggttagcgacgtcttccccagcgatttaaccctcgaatacgccttacagctggcatcgaaaatggcacgtcactcgccgctggccttacaagcggcaaagcaagcgctgcgccagtcgcaggaagtggctttgcaagccggacttgcccaggagcgacagttattcaccttgctggcggcaacagaagatcgtcatgaaggcatctctgctttcttacaaaaacgctcgcctgactttaaaggacgctaatgatggaattcatcctcagtcatgtagaaaagggcgtgatgacactaacgctcaaccgcccggaacgcctgaacagttttaatgatgagatgcacgcacaactcgcagagagcctgaaacaggccgagcgcgacgacactatccgttgcctgttacttacaggtgccgggcgcggattttgtgctggtcaggatcttaacgatcgtaatgttgatcccacaggccccgcaccggatttagggatgtcagtggagcgtttctataacccgctggtacgtcgcctggcaaaactgccaaaaccggtgatctgtgcagtcaatggcgtggcggcaggggctggcgcaacactggcactgggatgcgacatcgttattgctgcccgttcagcaaaattcgtcatggcgtttagtaagttaggcttagtacccgattgcggtggaacctggttactgccacgcgttgctgggcgagcgcgcgccatggggctggcactgctggggaatcaactgagtgctgaacaggcgcacgaatgggggatgatctggcaggttgttgatgatgaaacgctggcagataccgcgcaacagctggcgcggcatctggcgacacagccgacatttggtcttggacttatcaagcaagcgataaatagcgctgaaaccaatacgctcgatatgcaactggatctggaacgcgactatcagcgacttgccggacggagcgcagattatcgtgaaggtgtcagtgcgttcctggccaaacgctcaccgcagttcacggggaaatagcatgatgataaatgtgcaaactgtggcagtgattgggagcggcaccatgggggctggcattgctgaagttgccgccagtcatggacatcaggttttactgtatgacatttctgctgaagcgctgacccgcgcaatcgacgggatacacgcgcggctaaattcacgcgtgacgcggggaaaactgaccgctgaaacctgtgaacgcacattgaaacgccttatcccggtgaccgatattcacgcgctggcagcagcgaatctggttattgaagcggcgtctgagcgtctggaagtcaaaaaagcgctctttgcacagctggcggaagtttgcccgccacaaacgctattgaccactaacacttcgtcaatctctataaccgcaattgctgcggaggtaaaaaatcctgaacgtgttgcggggctgcatttttttaacccggcaccggtaatgaagttggtggaggtggtcagtgggctggcaacggcggcggaagttgttgagcagttgtgtgaactaacgttgagttggggtaagcagcctgtgcgctgtcattcgactcctggatttatcgttaaccgtgttgcgcgtccttattattccgaggcctggcgggcactggaagagcaggttgctgtaccagaagtgattgacgctgcacttcgcgatggcgctggtttcccgatggggccgctggaattaaccgatctgattggtcaggacgtcaattttgctgtcacctgttcggtgtttaacgctttctggcaggagcgtcgttttttaccttcgctggtgcaacaggaactggtgattggtggacggttgggcaagaaaagtgggctgggcgtgtacgactggcgcgcggaacgtgaggcagttgttggcctggaagcggtaagcgacagttttagcccaatgaaagtagaaaagaaaagtgacggtgtcacggaaattgacgatgttttattgattgagacacaaggcgagacggcacaggcgctggcaatacgactggcacgcccggtggtagtggtcgacaaaatggcgggcaaggtggtgaccattgctgcggcagcggtgaacccggactcagcgacccgcaaggccatttattacctgcaacagcagggcaaaacagtgctgcaaattgcagattacccaggaatgctgatttggcgaacggtagcaatgatcatcaatgaagcccttgatgcgctgcaaaaaggcgtggcctctgaacaggatatcgataccgccatgcgtcttggggtgaattatccatatggcccgcttgcctggggagcgcaacttggctggcagcgaatattaaggctccttgaaaatctacaacatcactatggcgaagaacgctatcgcccatgttcattgctgcgccaacgagcgcttctggagagcggttatgagtcataaggcctggcaaaatgcccatgcaatgtatgagaacgatgcctgcgctaaagcgcttggcatcgacattatctcaatggatgaaggctttgctgtagtgaccatgaccgtcactgcacaaatgcttaatggtcatcaaagttgccacggcgggcagctattttcactggctgatactgcctttgcctacgcctgcaatagccaggggctggcagccgtcgcttctgcctgcacgattgattttttgcgtccaggctttgccggagacaccttaactgctactgcgcaggtacgtcatcagggcaagcaaaccggtgtttacgacatcgaaattgttaaccaacaacaaaaaacggttgcgctgtttcgcggtaaatctcaccgcatcggcggcaccattacaggagaagcctgatgcgtgaagcctttatctgtgacggaattcgtacgccgattggccgctatggtggggcattatcaggtgttcgggctgacgatctggctgctatccctttgcgggaactgctggtgcgaaacccgcgtctcgatgcggaatgtatcgatgatgtgatcctcggctgtgctaatcaggcgggagaagataaccgtaacgtagcccggatggcgactttactggcggggctgccgcagagtgtttccggcacaaccattaaccgcttgtgtggttccgggctggacgcactggggtttgccgcacgggcgattaaagcgggcgatggcgatttgctgatcgccggtggcgtggagtcaatgtcacgggcaccgtttgttatgggcaaggcagccagtgcattttctcgtcaggcagagatgttcgataccactattggctggcgatttgtgaacccgctcatggctcaacaatttggaactgacagcatgccggaaacggcagagaatgtagctgaactgttaaaaatatcgcgagaagatcaagatagttttgcgctacgcagtcagcaacgtacggcaaaagcgcaatcctcaggcattctggctgaggagattgttccggttgtgttgaaaaacaagaaaggcgttgtaacagaaatacaacatgatgagcatctgcgcccggaaacgacgctggaacagttacgtgggttaaaagcaccatttcgtgccaatggggtgattaccgcaggcaatgcctccggggtgaatgacggagccgctgcgttgattattgccagtgaacagatggcagcagcgcaaggactgacaccgcgggcgcgaatcgtagccatggcaaccgccggggtggaaccgcgcctgatggggcttggtccggtgcctgcaactcgccgggtgctggaacgcgcggggctgagtattcacgatatggacgtgattgaactgaacgaagcgttcgcggcccaggcgttgggtgtactacgcgaattggggctgcctgatgatgccccacatgttaaccccaacggaggcgctatcgccttaggccatccgttgggaatgagtggtgcccgcctggcactggctgccagccatgagctgcatcggcgtaacggtcgttacgcattgtgcaccatgtgcatcggtgtcggtcagggcatcgccatgattctggagcgtgtttgagcatatcaacctgcgagtaccctacaatgataaccaatacaaagcttgacccgattgaaaccgcgtctgttgatgagttacaggcgttgcaaacacaacgtctgaaatggacgctcaaacacgcgtatgaaaatgtcccgatgtatcggcgcaaatttgacgcagcaggcgtacatcctgatgatttcagggaactttcagacctgcgtaaatttccctgtaccaccaaacaggatctgcgcgacaactatccctttgacacctttgccgtgccgatggaacaagtggtgcgcattcatgcttcttcgggaaccacaggtaaaccgacagttgtcggttatacgcaaaacgatattgataactgggccaatattgtagcgcgttctttgcgtgcggcaggggctcgcccaaagacaaaattcatgttgcctatggttacggcctgtttactggtgggctgggcgcgcactatggtgccgaacgtctgggcgctacggtgatcccgatgtctggcgggcagacggaaaaacaagcgcaactgatccgcgattttcaaccagatatgatcatggttacgccatcttattgccttaacctgattgaagagctggagcggcagttgggcggtgatgccagcggttgctcgctgcgggttggcgtgtttggtgctgagccgtggacacaggccatgcgtaaagagattgaacggcgtctggggatcaccgcactggatatttatggcctgtcagaagtgatggggccgggggtggcgatggagtgtctggaaactaccgacggtccaactatttgggaagatcatttctatcctgaaattgttaatcctcatgacggcacaccgcttgccgatggtgaacatggcgaactgttattcaccacgctgaccaaagaagcattgccggtcattcgttaccgcacgcgtgatttaacccgactgttaccaggaacggcgcggactatgcgccgcatggatcgcatcagcggacgcagcgatgacatgttgatcattcgcggtgtaaatgtcttcccgtcacaactggaagaagagattgtcaaattcgaacatttatcgccccattaccaactggaggtgaaccgccgggggcatcttgattcactttctgtgaaagtggagttgaaagaaagcagcctgacattgacgcatgagcagcgttgccaggtgtgccaccagctgcgccatcggattaagtcgatggtggggatctctaccgatgtgatgatcgttaactgtggcagtatcccgcgttcagaaggcaaggcgtgtcgggtgtttgatctgcgcaatattgttggtgcctgacgtgtcgtctggccctggtgaggtaaagcgccagggccagaagtcgatacgacctgtgctatgattcataaatcacaacaataacaacagactgaatcgaatgagtaaacttgttacttttatccaacatgctgtaaacgctgttccggtcagtggcacatctttgatctcctctctgtatggtgattcgctttcccatcgtggtggtgaaatctggctgggtagtctggctgctttgctggaagggctgggatttggtgagcgtttcgtgcgcaccgctttgtttcgtcttaataaagaaggctggctggatgtttcccgcatcgggcgacgcagtttctatagcctcagtgataaagcttgcgcctgacgcgacgggcagaaagtaaaatttatcgcgcagagcaacctgcatgggatggtaaatggctcctgttgctctcggaaggtttagataaatcaacgctggctgatgtcaaaaagcagttgatctggcaaggttttggcgcactggcacccagcctgatggcatcgccgtcgcaaaaactggccgatgtacagacacttttgcatgaagcgggtgtggcggataacgtgatttgttttgaagcgcaaataccactggcgctttctcgtgcagcactgcgtgccagagtagaagagtgctggcatttaactgaacaaaatgccatgtacgaaacctttattcagtcattccgcccgctggtgccgctgttaaaagaggcggcagacgagttaaccccggagcgggcatttcatattcagcttttactgatccatttttatcgccgtgtcgtccttaaagacccattgttgccggaggagttgcttccggcacactgggcagggcatacggcgcgtcagctgtgtatcaacatttatcagcgcgtagcgcctgctgctttagcgttcgttagtgaaaaaggtgaaacctcggtcggtgaactgcctgcgccgggaagcctgtattttcaacgttttggcggcttgaatattgaacaggaggcgttatgccaatttatcagatagacggtctgactccggttgtgccagaagagagttttgttcatccgacagcggtattgatcggcgatgttattctcggcaagggtgtttacgttgggccaaatgccagcctgcgtggcgattttggtcgtatcgtggtgaaagatggcgcgaacattcaggataattgcgttatgcacggttttcccgaacaggatactgtcgtggaagaagatgggcatattggtcatagcgctatccttcatggttgcattatccgccgcaatgcattagtgggaatgaacgcggtagtgatggacggcgcggtgattggcgagaacagcattgttggcgcatccgcatttgtgaaagccaaagcagaaatgccagctaattacctgattgtcggcagcccggcgaaagcgattcgtgaactcagtgagcaggagttggcatggaaaaagcagggtacgcatgagtaccaggtgctggtgacacgctgtaagcagacgttgcatcaagtcgaaccattgcgggaagttgaacctggcaggcagcgcctggtatttgatgagaatctgcgaccgaaacagtaacgtccagatactgaacattctaatttttagcatgtgatacctaaaccgcaacgctgatacaggttgcggttttttattgccggatgcggtacttgacgcgttttgttttgtgtttttcaggacaatagagcaactcatccagtaatcttgtttacgccctcgcattatttatctcttttcgtttctatactgatttttcttaatccgttttattacagggcagggtgcgatgagcagcaatacatttactctcggtacaaaatccgttaaccgtcttggttatggcgcgatgcaactggcaggtcctggggtttttggccccccaagagatcgccacgtcgctataaccgtgctgcgcgaggcgctggcattgggcgtcaatcacattgataccagcgacttttatggtccgcacgtcaccaatcagattatccgcgaagcgctttatccttactctgacgacctgacaattgtcactaaaattggtgcgcggcgtggagaggacgcttcctggttgcccgccttttctccggcagagttgcaaaaagcggtgcacgataatctacgtaatctcggcctggacgtactggatgtggttaacctgcgcgttatgatgggggatggtcatggcccagcggaaggatcgattgaggccagcctgaccgtgctggcagagatgcaacaacaaggcctggtaaaacatattggcctgagcaacgtcacaccgacgcaggttgcagaggcgcgcaagattgccgaaattgtctgtgtgcaaaacgaatacaacatcgcgcaccgtgctgatgatgcaatgattgatgctttggcccacgatggcattgcctacgtgccgttcttcccgctcgggggctttacaccgctgcaatcctctacgctgtcggatgttgctgcgagcctgggtgcaacacccatgcaggtggcgctggcgtggctgttacaacgttcaccgaatattttgctgatcccagggacgtcttctgttgcgcatttacgggagaatatggctgctgaaaaattgcatctttctgaggaagtgttgtctacgttggatggtatttcgcgagaataacgaatatacaaaagggaaagatgcatttcccttttgtttcttttttaatggcatggagtgcatatgtttaaggccaggatttgcggctggataggtttacttcccctgtttatgctgagtcttccagtacaggcggaacttcgatgtgttgcaaatacagttgatattgaaccattttttctgcggctaccgctgaagataaacaacaagttgaacaagctatcaacagtagcgtgaatcttgtccccttcggtttatctgcatcggactggaaagtgcatcgtggcgatttagtggtagaaggtaatatagagagtaatcaaaaattgattgttcttggtaatttgacagtcaaaggtaatatttccactttctctctttctaatccatgggttattctcggtaacgtgacggcaacgaatatagttacggattcaccactgttaattaccggttcgataaatgcaagtggactggtatttatcgactcatattacgataatccgtctacgattaaggggagtattaatgcgcgtgggatatttatcaatgacataattgcacctattgttgcgtcttcgacaaatagtgaattcatggtccgtgcgagtgacaaaaatgacactgaaaatgtcaaaaaagcgctgatgataataaatcctgatgcatattattggggtctaataaatgatgaagatgctctgaaagaaatttttaagcgaagcaatattcgcatggcagggaatgtctgtaatcagatgaaaaaagaagcgctgtttcgccctaagccttctcctgagttagtgcaggaattgcaaatgctggatgaaggcaacgttgctgcatttgaaggacgagatattgcgacatttgatcttgccataatccgaactctcccaaggcttaaaggaatttcagctaacctacgcaaacaacttattaatagcaatgatgaacaaacgattgaaagtatggcgagatatatgcctgacaatgagattctggagttgaccgatcagcaattgggttaccagcctgttgttctggggttgctcgaccgtgaaccgctctctgtcgaaataatgacgcgaatgagtcgtctacctgatggtgtcggtccgttgaatcttgcgctacgtgaaaatctccctctggatatcgtaatgactctggcgaaaagagattgggatatgatcattcaggagctttataaagatgcgtggttattgcctgaatccattattgatggctatatccgcagtgatgattcctctattcgtcaggtcggtgctggaggacaactcacctacaatcaggcaatgcagttggcgaacgattcatcaaacaatgttgtcacaagcttagcgttcaagctggcagagatgaaacaccatggtcaattattgcggatgacgccacaagagagtgacaaagttgcagcctatttataccaaaaattcgagaatgacgatgatctaatacgtgtgttatttttagcattgccagataacttacagtttaattttgttaaaaggatggagaaaaaatcccctgcctacttttgctgtcgggatatgcaggtaattcactctgacgctgctctacaacggttattgacacgtttcaacgatcctgaggggtggagtaatctggcgaaaaatcagtatctgagcacgtcgatgaaacaaaaatttggcaacgtgctttatcgcatcggaaaaataatccgaaagcagattcagctgcgtatgaaaccagcgctgatatgattttgtctgagcttatcagccacggtgaagttgatgatcagatgctattaaatgccacagccctgatacgtttggaagactgggactttttagagagtgcattagttagttgggataatttacccgctgttgtcctcaaggaattacagcaaaatacgccacgcaatgatatttgggcgaagttttttctgaggcaggaaaacagctcccgtgcgcaggttgatgaagcattacgcgtctattatgcactcgaccccgatgcgttagcacaactggatgtactggcaaaacaaccggatcgtatatggtggagtacactggcgaaaagcaatctcacatttttcaagttcggcgcacttaacaaccgccacacaccgcctgcagtactggcggcagaaattgatcccgagtggtggattgtggcgatgaataatccccgttttccagttgatgtattaaaggcgaggctgaaacgtgatcctttgctggcgttagagcttgttaaccctgaactggatttagtccgccagctggcgcttaacggtaagacgcgcgcaatacgggaacaagcgatgagaaaacttgatgagttgtattgatccacaacgtaatatttcttaaccctttgattaattggggataattattcctgacagtgagtccccaataccttgatatattctgaatttttaatgaagcggcgtgttgcgatatctccgtcaggggaattgatgcaccatagcgcaaaccgaattatcaaggattgataatgacgctctaccagataaaaccgctctttcagtcgctgttaaggccgacgatgttttggctttacaagcaccacgttacagcgaatcacatcactcttgctgcactggcgctttctcttcttaccggattgctgttggtgttggtggcacaacccatcctctttttgctattgcccatcgtgctttttatccgtatggcgctcaatgcgctggatggcatgttggcgcgtgagtgcaatcagcaaacacgtctgggggcgattttgaatgaaactggcgatgttatttccgatattgcgctctatttaccgtttttatttttaccggaaagtaacgcatcactcgtaatactcatgttattttgcaccatattgactgagttttgtggtttactcgcgcagacaattaacggtattcgcagttatgccggtccattcggcaaaagcgatcgtgcgttaatatttgggttgtgggggctggccgtttccatttatccacagtggatgcaatggaataatcttttatggagcattgcttcaattctgcttctctggactgcgattaatcgttgtcggagtgtgctttttatgagtgctgaaagataatgctggaaaaatctctggcaacacttttcgcgttgttaattttagcaacgctgataaaccgttttctgctatggcggttaccggagagaaaagggggtgaggttacattacgtattcgtacctggtggggcatcgtcatttgtttttcactggtgatttcaggtccacgctggatgacgttgacgttttttgcgctgataagttttctggcattgaaagaatattgtacgcttatatccatacattttccgcggtggttatattgggttattcctcttaactatttgcttatcggttttaattgctttgagctgtttctgttatttatacctttgtctgggtttctgatattagccacctggcgagtttttgtgggtgaaccctccggttttctgcataccgtgagcgctattttttggggctggataatgaccgttttcgccttgagtcatgccgcctggttattaatgtttccatccatgaatatccagggcggggcgttactggtgttatttcttttggcgttaaccgagtcaaacgatattgcacagtatttatgggggaaatcctgcggcagaagaaaagtggtccccaaagtcagcccgggaaaaacgctggaaggtctggtggggggcgtcatcaccaccatgattgcgtcactgattattggaccgttgctgacaccgctaaatacatcacaggcattattagcgggtttgttaattggtattagtggtttttgcggcgatgtagtgatgtcagccatcaaacgagatattggtgttaaagatagtggaaaactattaccaggacatggcggactccttgacaggattgactcattaattttcaccgctccggtatttttttattttatacgctactgctgttactgaaggaaaatagagaaaatggaaaattcacgcatctctggggaacatttttttaccaccagtgataatacagcgttgttttatcggcactggcccgctttacagcccggggcgaaaaaggtcatcgtcttatttcatcgtggccatgaacattctggtcgtctacaacatatcgttgatgaactggcgatgccagatactgctttttatgcctgggatgcccgagggcatggacaaacttcgggggcgcgtggttatagcccatctcttgcgcgttcagtgcaggatgtcgatgaatttgttcgttttgctgccagcaatagccaggtcggactggatgaggtggtagtgatcgcgcaaagcgtcggcgcagtgctggttgccacatgggttcatgattatgcgcctgcaattcgcgggctggtgctggcttctccggcctttaaggttaaattgtatgtgccgctggcacgtcctgcgctggcgttatggcatcgtctgcgtggtctgttttttattaattcctatgtgaaaggacgctatttgacccacgatcggcaacgggtggcgagtttcaataatgatccgctgatcacacgggcgattgccgtcaatatcttgctcgatctctataaaacgtctgaacgtattattagagatgcggcggcgattacgctccccacgcaacttctgatatcaggcgatgactatgtggtgcatcgccaaccgcagattgatttttatcagagattacgtagccctctgaaagagctgcatctgctgccaggcttttatcacgacacgttgggtgaagagaacagggcgcaggcatttgaaaaaatgcaaagctttattcgtcgtttatatgctaacaagtcacaaaaatttgattatcagcatgaagaccgcactggaccatcagcggatcgctggcggctcctttcaggtggacccgtgccattatcgccggttgatttggcgtatcgctttatgcgaaaggcgatgaaattgttcggggcgcactctgcgggcctgcatctcggaatgagcaccggctttgattcaggcagttccctggattatgtctatcaaaatcaaccgcaaggcagtaacgcattcgggcgcttaattgacaaaatctacctgaacagtattggctggcgcggtattcgccagcgtaaaacccatttacaaatactgattaaacaagccgttgccgatctccacgccaaaggtttagccgtccgcgtggttgacattgccgcagggcatgggcgctatgtactggatgcgctggcaaacgagcctgccgtaagcgatattttgttacgtgattacagtgagttaaatgttgcacaggggcaagcgatgattgcccaacggggaatgtctgggcgggtgcgttttgaacagggcgatgcgtttaacccggaggaactcagcgcgttaactccgcggcctacgctggcaattgtctctggactgtatgagctgtttcccgaaaatgagcaggtaaaaaactcactcgcaggtcttgccaatgccatcgaaccgggtggcattctcatctacactgggcagccgtggcacccacaactggagctgattgccggggtgttaaccagtcataaagatggtaaaccgtgggtgatgcgcgtgcgttcgcaaggggagatggattcactcgtgcgtgatgccggatttgataaatgcacacaacggattgatgagtggggtatttttacggtttcgatggcggtgcgtcgtgataactgaacgtcggaacgtattgctacaaggcgctggctggttattgttgctggccccttttttcttcttcacctatggatctcttaatcagttcaccgcggttcaggaccttaacagccatgatatccccagtcaggtattcggttgggaaacggcgatcccttttcttccctggactattgttccttactggagtctggatcttttatatggattttcgctgttcgtttgtagcacgacattcgaacagcgccgacttgtccaccggcttattctggcaacggtaatggcctgctgcggttttttgctctatccgctgaagtttagttttatccgtcctgaagtgagtggggtgacgggatggctattttcgcaacttgaactgtttgatctgccttataaccagcctccttcgctgcatattattctctgctggctactttggcgtcactttcgtcagcatctggctgagaggtggcgtaaagtctgtggcggatggtttttactcatcgctatttctactctgacgacctggcagcatcattttattgatgtcatcacagggctggcggtaggtatgttgattgactggatggtgcccgtcgatcgtcgttggaattatcagaaacctgatcaacgtcgaatcaaaatagcactgccatatgtcgtaggcgcgggctcgtgcattgtgttgatggagctaatggtgatgattcagttatggtggtcagtctggttatgttggccagtattatcgctactcattattggccgtgggtacggtgggcttggcgcgataacaacagggaaagatagtcaggggaaactcccgcccgccgtttactggctgacattgccctggcgcatcgggatgtggctgtttatgcgttggttttgtcgtcgcctggagccggtgagcaaaatgactgctggtgtttatttaggggcgtttccacgacatattccggcacagaatgcggttctggacgtcacctttgaattccctcggggacgagcgacaaaagatcgactctatttctgtgtaccgatgctggatctggtggttccggaagagggggagctccgacaggccgtggcgatgctggaaacattacgcgaagagcaaggcagcgttctggtccattgcgcgttgggattatcgcgcagtgcgctggtagtggcggcatggttgttatgttacggacactgtaaaaccgttgatgaagcgattagttatattcgagccagacgttcgcatattgtgcttaaggaagatcacaaagcgatgctgaaattatgggaaaacaggtaagtggattgagatgtggactgaactacagtccacatcaagatcgtgtccggttatgcagcaacaatgctgtcgatggccgctttcgcgtcagactgcgctttcgctgccatttccggaccgtatgcgatcccttcggcgaagacaaatttcacatcggtaatgccgataaagccgaggaacgtggacagatacggcgtcaccaggtccgttggtccatctttgtggatcccaccgcggctggtaataacgatggcttttttacccgttaccagaccttccggaccgttctcggtatagcggaaagtaacgcctgcgcgtgcaaccaggtcaaaatagtttttcaactgagttgagatgttgaagttatacatcggtgccgcaataacgataacgtcgtgggctttcagctcggcaatcagctcatcggaaagcgccagagcttcctgctgacgcggagtcagcggcgcatcgctcggacgcagtgcaccaaccagttcgccatccagtaccggaatcggatttgcagccaggtcgcgaacggtgatttcatcagcggagtgcttttcgcgccattgttcaacaaaataatcggacaactgattagactgagagtaccctgccaggatgctggatttaagaactaataccttgctcatggtgtttccttatagatgtttgaatgggcgatgccccgttgcttgctgacactttattcacaatcctgccacagagatagcgcaataaatcgaagcctatgttcgaatttattgaacaacgcatagaaagccgcgatgtggtactctatatctatcatttaaaagaaaattaatcaggcagactactgcccactaacgttatgacagaacaacaaaaattgacctttacggccttgcagcagcggctggattcgctgatgctgcgcgacagactgcgtttttctcggcgtctgcacggtgttaagaaggttaaaaatcctgatgcacaacaggccattttccaggagatggcgaaagagattgaccaggcggcagggaaagtcctgctgcgtgaagcggcacgaccggaaattacttatcctgacaatttaccggttagtcagaaaaaacaggacattctcgaagcgattcgtgatcaccaggtggtgatcgtcgccggggaaacgggttctggtaaaacgactcagttaccgaaaatctgtatggagctggggcgcgggattaaagggctgatcggccatacccagccgcgtcgcctggcggcaagaacggtggcgaaccgtattgcggaagagctgaaaacggagccgggcggttgcatcggttacaaagtgcgtttcagcgatcacgttagtgataacacgatggtcaagctgatgaccgacggtatcctgctggcggagatccagcaagaccgcctgctgatgcagtacgacaccatcattattgacgaagcacacgaacgcagcctgaatatcgattttctgctcggctatttgaaagagttgctgccgcggcgtcctgacctaaaaatcattatcacttccgcgactatcgacccggaacgcttttcgcgccactttaataatgcgccgattatcgaagtctccggtcggacctatccggtggaagtgcgctatcgaccgattgttgaagaagccgacgacaccgagcgcgatcagttgcaggcgatttttgacgccgtagacgaactgagtcaggaaagccctggcgacattctgatctttatgagtggtgagcgggaaattcgcgataccgccgatgcgctgaacaagctaaatctgcgtcataccgaaatcttgccgctttatgcgcggctttcgaacagcgaacagaaccgcgtgttccagtcgcacagcggacggcgcattgtgctggcgaccaacgtcgcggaaacctcgctgaccgtaccggggattaaatacgttatcgaccccggtacagcacgtatcagccgctacagctatcgcaccaaagtgcagcgtttgccgattgaacccatttcgcaggcgtctgccaatcagcgtaaaggccgctgtgggcgtgtgtccgaagggatctgtattcgtctctattccgaagacgatttcctttcgcgcccggagtttaccgatccggagattctgcgtaccaacctggcctcggttattttgcagatgaccgcgctggggctgggcgatatcgctgcgttcccgtttgtcgaagcaccggataaacgcaatatccaggatggcgtgcgtctgctcgaagaactgggcgcgatcaccacggatgaacaggccagcgcctataaactgacgccgctcggtcgccagctctcgcagttgcctgtcgatccacgtctggcgcgtatggtgctggaagcgcaaaaacatggctgcgtgcgtgaggcgatgattatcacgtccgcgctttccattcaggatccgcgcgagcgtccgatggataaacagcaggcatcggacgaaaaacatcgtcgcttccacgacaaagagtctgacttcctcgcgtttgtgaatctgtggaattatcttggcgagcagcaaaaggcgctttcttccaacgccttccgtcgcctgtgtcgtaccgattatctcaactatctgcgcgtgcgcgaatggcaggatatctacacccagttgcgccaggtggtgaaagaacttggcattccggttaacagcgaaccggcggagtatcgcgaaattcacattgcgttgctgacgggtttactttcccatatcggcatgaaagatgccgataaacaagaatataccggcgcacgtaacgcgcgtttctccatcttccccggttctggtttattcaaaaaaccgccgaaatgggtaatggtggcggaactggtagaaaccagccgcctgtgggggcgcattgctgcgcgtatcgacccggaatgggtggagcctgtcgctcagcatttgattaaacgtacctacagcgaaccgcactgggaacgggcgcagggcgcggtgatggcaacggaaaaagtcactgtttatggtttgccgatagttgccgcgcgcaaggtcaactacagccagatcgatccggcgttatgtcgtgaactctttattcgccatgcgctggtggaaggtgactggcagacgcgtcacgcattcttccgtgaaaacctgaaactgcgggccgaagtggaagagctggaacacaaatcacgtcgccgcgatattctggttgatgacgaaacgttgtttgagttctacgaccagcgcatcagccacgatgtaatctccgctcgtcacttcgacagctggtggaaaaaagtcagccgcgaaacccctgatttgctcaactttgaaaaaagcatgttgatcaaagagggcgcagaaaaaatcagcaagctggattacccgaacttctggcatcagggcaatctcaagctgcgtttgagctatcagtttgagcccggcgcggatgctgacggtgtgaccgtacatattccgctgccgttacttaaccaggttgaggagagcgggtttgaatggcagatccccggtctgcgccgcgaactggtgattgctctgattaaatcgttgccgaaaccggtacgccgtaattttgtacccgcgccaaactatgccgaagcgtttttaggccgcgtcaaaccgctggagttaccgttgctcgacagccttgagcgcgagttacggcggatgaccggcgttaccgttgaccgcgaagactggcactgggatcaggtgcctgatcacctgaaaattaccttccgcgtggtggatgacaaaaacaagaagctaaaagaagggcgctcgctacaagatctgaaagatgcgctgaaaggcaaagtgcaggaaacgctatctgcggtggcggatgacggtatcgagcagagcggcttacatatctggagttttggtcagctgccggaaagctacgaacagaagcgtggcaactacaaagtgaaggcgtggccggcgctggtggatgagcgcgacagtgtggcgatcaaactgtttgataacccgctggagcaaaagcaggcaatgtggaacggtcttcgccgtctactgctgctgaatattccatcgccaatcaaatatttacatgaaaagttaccgaacaaagccaagctgggactgtactttaacccgtatggcaaagtgctggagctgatcgacgactgtatctcctgcggtgtggatcaattgatcgacgccaatggtggcccggtctggacggaagaaggctttgctgcgctgcatgaaaagtgcgcgccgaactgaatgacacggtggtggatattgcgaagcaggtcgagcaaatcctcactgcggtgttcaatatcaacaaacgtctgaaagggcgggtggatatgaccatggcactggggctttctgacattaaagcgcagatgggcgggttggtatatcgcggttttgtcactggtaacggcttcaaacggctgggcgacacgctgcgatatttgcaggcgattgaaaaacggctggaaaaactggcggttgatccacatcgcgaccgtgctcagatgctgaaagtcgaaaacgtccagcaggcgtggcagcaatggatcaacaaactgccgcctgcacgtcgtgaggatgaagacgtgaaagagatccgttggatgatagaagagttgcgcgttagttacttcgctcaacaacttggtacgccttatccgatttcagataagcgtattttgcaggcgatggagcagattagcggttaaccctgctatttgcctgataaagaaaaaacccggtaagcatttagcgccgggttttttattaattctaaaacggtaagggtaaaaattcaggaattcagaaaaatacaattctctgctgcaagatgaataatgtttatctacagcatttccttaaaagatatgtcaggcttgcggagtggcggttaaggacatacgacttcctcctttcagagtgctccgcttctcactattatctcacgcagtattcttaagggaacgataaggaggaaccatgaacattaccccgtttccgacgctttcgccggcaactatagatgccataaatgttatcggacagtggctggcgcaggatgatttctccggtgaggtgccgtatcaggccgattgcgtgatccttgcaggcaatgcggttatgccgactatcgacgcggcatgtaagattgctcgcgatcagcaaattcctttactgattagtggtggtatcggtcactcgacaacttttttgtatagcgccatcgcacagcatccgcactacaacactatccgcaccactggcagagcagaagcgaccatcctggcggatatcgctcatcagttctggcacattccgcatgaaaaaatctggattgaagaccagtcaacaaactgcggtgaaaacgcacgctttagcatcgcgctattgaaacaggccgtagaacgagttcatacggctatcgttgttcaggaccccaccatgcagcggcgcacgatggcgacgttccgccgtatgactggggacaatcccgatgcaccacgctggttaagttatcccggattcgttcctcagttaggaaataacgcagacagtgtaatctttattaatcagttacaaggattatggccggttgagcgttatctctcactactcactggcgagctgccgcgtttacgcgatgatagcgatggctacggtccccgcgggcgagattttatcgttcacgttgattttccggcagaagtcatccatgcatggcaaatgctgaaacatgatgcggtgctcatcgaggcgatggaaagtcgctcgttacgttaaaaattgcccgtttgtgaaccacttgtttgcaaacgggcatgactcctgacttttatttctgccttttattccttttacacttgtttttatgaagcccttcacagaattgtcctttcacgatgccgtctctctgatgattgatgttaattaacaatgcattcaccgaaaataaacatataaatcacaggagtcgcccatgtcagtacccgttcaacatcctatgtatatcgatggacagtttgttacctggcgtggagacgcatggattgatgtggtaaaccctgctacagaggctgtcatttcccgcatacccgatggtcaggccgaggatgcccgtaaggcaatcgatgcagcagaacgtgcacaaccagaatgggaagcgttgcctgctattgaacgcgccagttggttgcgcaaaatctccgccgggatccgcgaacgcgccagtgaaatcagtgcgctgattgttgaagaagggggcaagatccagcagctggctgaagtcgaagtggcttttactgccgactatatcgattacatggcggagtgggcacggcgttacgagggcgagattattcaaagcgatcgtccaggagaaaatattcttttgtttaaacgtgcgcttggtgtgactaccggcattctgccgtggaacttcccgttcttcctcattgcccgcaaaatggctcccgctcttttgaccggtaataccatcgtcattaaacctagtgaatttacgccaaacaatgcgattgcattcgccaaaatcgtcgatgaaataggccttccgcgcggcgtgtttaaccttgtactggggcgtggtgaaaccgttgggcaagaactggcgggtaacccaaaggtcgcaatggtcagtatgacaggcagcgtctctgcaggtgagaagatcatggcgactgcggcgaaaaacatcaccaaagtgtgtctggaattggggggtaaagcaccagctatcgtaatggacgatgccgatcttgaactggcagtcaaagccatcgttgattcacgcgtcattaatagtgggcaagtgtgtaactgtgcagaacgtgtttatgtacagaaaggcatttatgatcagttcgtcaatcggctgggtgaagcgatgcaggcggttcaatttggtaaccccgctgaacgcaacgacattgcgatggggccgttgattaacgccgcggcgctggaaagggtcgagcaaaaagtggcgcgcgcagtagaagaaggggcgagagtggcgttgggtggcaaagcagtagacgggaaaggatattattatccgccgacattgctgctggatgttcgccaggaaatgtcgattatgcatgaggaaacctttggcccggttctgccggtggtcgcatttgacacgctggaagatgctatctcaatggctaatgacagtgattacggcctgacctcatcaatctatacccaaaatctgaacgtcgcgatgaaagccattaaagggctgaagtttggtgaaacttacatcaaccgtgaaaacttcgaagctatgcaaggcttccacgccggatggcgtaaatccggtattggcggcgcagatggtaaacatggcctgcatgaatatctgcagacccaggtggtttatttacagtcgtaatgagtaaaagaggcggaggttttttcctccgcctgtgcgcgtcagagtttagcgaatttttcgagggtgcgaataagctgcgtgacgaagccatattcgttatcgtaccaggcgaccgttttcaccagttgtaaatcgcccacggcggtaatttccgtttgcgtggcatcaaacaccgaaccgaaatggctgccaatgatatcggaagagactatttcttcatcggtataaccaaatgactcgttattggtggttgcttgtttaagtgcgttattcacctcttcggcagtcactttttttccgagaatggacaccagctcagtgaccgaacctgttttcaccggcacgcgttgcgcatgacctttcagtttgccgctcagttccgggatcaccagaccaatggcttttgccgcccccgtagtgtggggaatgatattttctgccgctgcgcgtgaagcacgtaaatctttaccacgtgggccatccaccagtgactgggtgccagtataggcatgaatggtcgtcatcgtgccgacttctatcccgaaactgtcatgcaaggctttggccatcggcgcaagacagttagtggtgcatgacgccacggaaacaatggtgtcgttgccatccagagtgtcgtcattgacgttataaacgatagttttcatttcaccggcaggggcggaaatcaacaccttcttcgcaccagcatcaagatgcgcctgcgatttctcggcggaggtataaaagccagtacattcgacaatgatttctgcacctttcgctttccacggaatatttttagcctctttttcggcgtaaaccgcgatacttttcccatcaacgataagtgaatcttccgtaaaatcaacgctccaggggaatggtccgtagtttgaatcatgtttcagcaggtaggcgagaatttttggggaagtgagatcattaatagcgacaacgtctatgttgcttttgacttcaagtaatcgacgcaacaccagtcgaccgatacgaccaaaaccgttaataccaactttactcatggttttctcctgtcaggaacattcggatgaaaattgatcctttccaggcttagcccaggattgtgggatgggcaatctccattcttacagtgaaacgtaacgtactgaaaacgggtgaacaatatttaatgaaattttgagaaaagcccgttatgttaacggaaaattatgttaaagcaggaaatgttatggaaaataaatactcaaggttacaaatcagcattcactggctggtctttttgctggttatcgcagcgtattgcgcaatggagtttcgtggtttcttcccacgtagcgatcggccactcatcaacatggttcatgtttcctgtggtatctcaattctcgtgctgatggtggttcgtcttttgttaagactgaaatacccaaccccgccgattatacctaagccaaaaccgatgatgacgggactggcgcatttgggacatttggtgatttatctcctgtttattgcgctgccagtgattggtttggtgatgatgtataaccggggcaacccgtggtttgcgtttggtttgacgatgccttacgcttcagaggccaatttcgaacgggttgatagcttaaagtcgtggcatgagacgctggcgaatctgggatattttgtcatcgggttgcacgctgcggctgcactggcacaccactatttctggaaggacaacacacttctacgcatgatgccgcgtaaacgttcctgaaggatatttaaagaaaacgcctgtactaaaaccgacccgtggtacaggcgaagaatacgggtctacatcggaagcgcctattatatttatttgtatgacaaataaaaccataatccttgcccatacgtccatctggcttatttttaatcaattcacccgatctttgatctcatcaacggtatcaaaataaaccagcgtataacgttcaaatcgaacataagattcgataaaccatggaggttatatgaaaaaactggcacttattttgtttatgggaacgcttgtttccttttatgccgatgccgggcgcaaaccctgttctggttcgaaaggggggatctcacactgtacggcaggcggcaaatttgtctgtaatgatggttctattagtgcctcgaaaaaaacatgcactaactgaagtgtaaaaggggtgccatgagaaaatgaatctgctagtcagatgcgcggggaaaatccccgcgcttgcccttacctggacgtgcaggccatgagcgcagcaacctccttatcaccgtcccggaaccgcagttcgtagagcgtttgtcgggtcaggagtgtgaatgtcagaatcgtaatgcagataatgagcagacacaccaccagagggttgtgcttcatagcctttctccttgccggatggcgggtaagaggctaagatctgaattgctaggttcattcgttggcctcggttgatagaaatatcggtcggggccttcgtctttctgattcccggttagcctgaaaacagaaagtctcaggcacccgcaggcatcctatgaggtttccttagggacgaaaataatcacttcacgaaattgcgtgctgttttccagaatttttcgtcattcgggttagccagtttagccattcgttactctcttcattccaatagcattaattttctctgcaataattgttgtaaaaatgtgacgcaaagaggtttttggtcataagtaattaccgtcaagtgccgatgactttctatcaggagtaaacctggacgagagacaacggtaatgaatacaactccctcacatcgattaggttttttgcatcacatcaggctggttccgttatttgcctgcattcttggcggtatcttagttctattcgcattaagttctgctctggctggctatttcctctggcaggccgatcgcgatcagcgtgatgttactgcggagattgagattcggaccgggttagcgaacagttcagattttttgcgttcagcccggatcaatatgattcaggccggggctgcgagtcgtattgcggaaatggaagcaatgaagcgcaatattgcgcaagccgaatcggagattaaacagtcgcagcaaggttatcgtgcttatcagaatcggccggtgaaaacacctgctgatgaagccctcgacactgaattaaatcaacgctttcaggcttatatcacgggtatgcaacctatgttgaaatatgccaaaaatggcatgtttgaagcgattatcaatcatgaaagtgagcagatccgaccgctggataatgcttataccgatattttgaacaaagccgttaagatacgtagcaccagagccaaccaactggcggaactggcccatcagcgcacccgcctgggtgggatgttcatgattggcgcgtttgtgcttgccctggtcatgacgctgataacatttatggtgctacgtcggatcgtcattcgtccactgcaacatgccgcacaacggattgaaaaatcgccagtggcgatctgacgatgaatgatgaacctgcgggtcgtaatgaaatcggtcgcttaagtcgtcatttacagcaaatgcagcattcactggggatgacagtagggactgttcgacagggcgcggaagagatttatcgtggcaccagcgaaatttcagctggcaatgcggacctgtcatctcgcaccgaagaacaagcggcggctatcgaacaaactgccgccagcatggagcaactcactgcgacggtgaaacagaatgcggataacgcgcatcatgccagcaaactggcgcaagaggcttctattaaagccagcgatggcgggcagacggtttccggtgtagtaaaaacgatgggcgctatctccacgagttcgaagaaaatttctgagatcaccgccgtcatcaacagtattgctttccagacgaatattctggcactgaatgctgccgttgaagccgcgcgagcgggtgagcaagggcgtggatttgccgttgtcgccagcgaagtacggacactcgcaagtcgcagcgctcaggcggcgaaagagattgaaggcttgatcagtgaatcagtcaggttaattgacctggggtcggatgaggtggcaacggcagggaaaaccatgagcactattgttgatgccgtcgcgagtgtcacacatatcatgcaggaaatcgccgccgcctcggatgaacaaagtagaggcataactcaggttagccaggcgatttctgaaatggataaggtgacgcaacagaatgcttctctggtagaagaggcctcagcagcggcggtgtcccttgaagaacaggcggcacgattaactgaggcggtggacgtattccgtctgaacaaacattctgtgtcggcagaacctcgcggagcgggtgaaccagttagtttcgctacggtgtgaaaatgttcaaggagggatcgacagatcccttcacctttcagaacggcattgattttcgaatagcgttaatcatcaactggcaaccagaagagaacgtcgcatctacgcgggtcagtattccaatcggttcgcctgcaccatgtcccggaacaggcagggccaccagcgtggcatgacgcaggtcgtcttttaccgcgccagaagggacaaaccacacgtagtcgtattcaaccgtaagttgacgagatagcgaagcagacagcgtttcgatacaacccgaaggaattttacagccctggctctgcactaatgcatctgaatgctggcgtggcgcagtgccttctggtgatacaacgaccggccattccagcacccggcttagcgttacgttctcctgaagtagcgggtgattagggcggacaaccagcttcagcgattcaagaaacagcagttcgtaattaagcccggtcatcagttcaggatctgacatccgaccaatgccgatatcgatttccccggttttaaacccgccagaatcatagggttactcattgtcgcaacttgcaaggtcgtctctttttgttgctgatgaaactgacctataaccgaaggtaatatccccagtgccgcagtaggtagtgcaccaaccctgacgacatcattattaagatcttctttacgatgaagcgactgtccggcagtgttgatggcgtcaagaactctgactgcatgcgttaaaaattgttcgccgggtaaggtaagttgcgccccctgacgaccacgctcaaacaagcgagcgccagtcagctgctccagttcattcaatgtcttagagagcgcaggttgactcaaattaagggtttcagccgcgcgccccaaagttccttgttgtgcgacagctacgaatgtatgaaggtggcgcaaacggatgcgctgactaaacagactatttttttccataagcgatgttaaaaacgaagcggtgtcgctgacaagtgaagttgtttgattatgataacttgattgcaaaatattattaacaattaaagcaattatgttacagcaaaatggataatattgatgttttcgcggcgagatcacagtttgtaaattcttcccgccagagtgaatgcggttacctacactccagattactgaccactggaggcagacactatggcgaacagcatcacggcggatgagattcgggaacagttttcgcaggcaatgtcagccatgtaccagcaagaagttccgcaatatggcacgctgctggaactggtagctgatgtgaatctggctgtgctggaaaacaatcctcaactgcacgaaaaaatggtaaatgcagacgagctggcgcgactgaatgttgaacgtcatggggcgattcgcgttgggactgcacaagagcttgctactcttcggcggatgtttgccattatggggatgtacccggtgagctattacgatctctcgcaggcaggggtgccggtacattcgacagcatttcggcccattgatgatgcttctctggcgcgtaatcccttccgcgtttttacctccttactccgccttgagcttatcgagaacgaaattttgcgccagaaagcggcggagattctgcgtcagcgcgatatcttcaccccacgttgtcgacaactgttagaggaatatgagcagcagggcggttttaacgaaacacaggcacaggagtttgtgcaggaagccctggaaacgtttcgctggcaccagtcagcaacggtagatgaagaaacctatcgcgccttgcacaacgaacatcggttgattgctgatgtggtctgttttcctggatgccatatcaaccacctgacgccacgtacgctggatattgaccgggtgcagtcgatgatgcctgaatgcggaattgaacccaaaattctcatcgaggggccgccgcgccgcgaggtaccgattttactacgccagaccagctttaaagcactggaagagacggtgttgtttgcggggcagaaacagggcacgcataccgcgcgctttggtgaaattgagcagcgtggcgtggcattaacgccgaaagggcgacaactgtatgatgatcttctgcgtaacgctggaaccgggcaggataatctcactcaccaaatgcatttacaggaaaccttccgcacttttcctgacagtgagtttttaatgcgtcagcaagggctggcatggttccggtaccgtctgacgccttcaggtgaggcgcatcgtcaggcgattcatcccggagacgatccacagcccttaattgaacgtggttgggtcgcggcgcaacccattacctatgaagatttcttgcccgttagcgcggcggggatcttccagtcaaatctgggtaatgaaacgcagacacgcagtcacggtaatgccagtcgcgaagcatttgagcaggcgttgggttgtccggttttggatgagttccagctttaccaggaagcggaagaacgcagtaaacgtcgctgtggtttgctttaaattctgaccatccgcctttgcaaaaatttgcctgattttacaaacgaatcaggctcatcccatcgacataaaaaaaatgccgatttatgcatattctctcagttcaacaattggattattaataaatattgtctagagtgagcggtcataaataagcactttcttgccgctgaaaacgaccagcgcgggaccattcacaacaccagaaggactcactttcaggtatggatcgtagacgatttattaaaggttcaatggctatggccgccgtgtgcggtaccagcggcattgcttctcttttttctcaggcggcattcgcggcagattctgatattgccgacgggcaaacccagcgttttgacttctccattctacagtcaatggcgcacgacttagcgcaaacagcgtggcgtggtgcgcctcgtccgttacctgacacgctggcgacaatgacgccgcaggcttataacagtattcaatacgacgccgaaaaatcgctctggcataacgttgagaaccgtcaactggacgctcagttcttccatatgggaatgggattccgtcgccgcgttcgtatgttttctgtagatccagcaacacatctggcgcgtgaaattcactttcgcccggagttgttcaaatacaacgatgcgggtgttgatacaaaacaattagaagggcaaagcgatctcgctttgccggttttcgcgtgtttaaagcccccgaactggcgcgccgtgatgtagtatcatttctcggcgcgagttatttccgcgccgttgatgatacatatcaatacggtttgtcggcccgcggcctggcgatcgacacttacactgacagtaaagaagagttccccgactttaccgccttctggtttgatacggtaaaaccgggggcaactacctttaccgtttatgcgttgctcgatagcgccagcattactggtgcctataagttcactatccattgtgagaaaagtcaggtgattatggatgtggaaaatcacctgtatgcgcgcaaagacattaaacagctgggcattgcgccgatgaccagtatgttcagctgcggtactaatgaacgtcggatgtgcgatacaattcatccgcaaattcatgactctgatcgtctgtccatgtggcggggcaacggcgagtggatttgccgtccgctgaataatccgcaaaaattgcagttcaatgcttacaccgacaacaacccgaaagggtttggtttattgcaactggatcgtgacttctcccattatcaggacattatgggctggtataacaaacgcccaagtctgtgggtggagccgcgtaacaagtggggtaagggcaccatcggcctgatggaaatcccaacaacgggcgaaacgctggataacattgtctgcttctggcagccagaaaaagctgtaaaagcaggtgatgagtttgcattccagtatcgtctgtactggagtgcgcaaccgcctgttcattgcccattagcgcgcgttatggcgacgcgtaccggcatgggcggtttcccggaaggttgggcaccaggtgaacactatcccgaaaaatgggcgcgtcgttttgccgtcgatttcgttggtggtgatctgaaagctgccgcaccaaaaggcattgagccggtgattacgctttccagtggggaagcgaagcaaatcgaaattctctatattgaacccattgatggttatcgtattcagtttgactggtatccgacttcggactccactgatccggtcgatatgcggatgtatctgcgttgtcagggcgacgctatcagtgaaacatggctgtatcagtatttcccgccagcgccggataaacgtcagtatgttgacgaccgcgtgatgagttaatcgttttttcttcggcaccttcttcgggaggtgccgtctggttaaacacgatcccgctcgcatttttccctaagttaaatgagtaatctgatggtgtgtatttcagatacaccttgtcagccactaacagggagtgcgtatgtttccagaataccgagatttaatatcccgtctgaaaaacgaaaatcctcgctttatgtccttgttcgataaacacaataaacttgatcatgaaattgccagaaaggaaggttccgacggtcgagggtacaatgcggaagtggtccgcatgaaaaaacaaaagctacagttaaaagatgagatgctcaaaatcctgcagcaggagagcgtcaaagaggtgtaaactttcctaagccgccagccaggcggcttttttaacaacagcatggattgactggagataagatgactgaaacgataaaagtaagcgaatcacttgaattacatgctgttgcggaaagtcacgtcacacctctttatcagttaatctgtaaaaataaaacctggttacagcagtcgctaaactggccgcagttcgttcagagtgaagaggacacgcgaaaaacggtgcagggtaatgtgatgttgcatcaacgcggctatgccaaaatgttcatgattttcaaagaagatgaacttatcggcgttatctcgtttaatcgtattgaaccactgaataaaactgctgaaatcggctactggctggacgaatctcatcaggggcaggggatcatttctcaggcgctgcaggcattgattcatcattacgctcagtctggtgaacttagacgcttcgtgatcaaatgtcgggtggacaatccgcaaagcaaccaggtcgctttgcgcaatggttttatccttgaaggttgcctgaaacaggctgagttcctgaatgatgcctatgatgatgtgaacttatacgcgcgtattatcgattcataataaccctgccagcggcgttcgcgtaatgcgctcctcgccgttaatgacttttggaccacggacatgaaccgtgtcgccatcaaaggcttcaacgacggcgtggtcggttaactccacatggttttcaattatcaccgcacctgaaatacggctctcaccttgtattacaacgtgctcgtcgagcagaatcggtccaccacgtaccacggcatttccgccaatcaagacatgatgttttaacacacaattaccttccacaatggcatattccgccacctgcgaactgtaatgaatcgtcggaatggcatcttcttctatgccagctttcacctgcgcgtgaccgtagactttagcgcaatcgcatagccagacgttgttctcttcattaccttcaacactggcaaaatcaaaaatttcggcgcgatgttcaataaaagcataccggacgacggcatcgccataaatttgtgcctggtggacaatacgcgaggcgctaactcttgcgcgatcataaatttggagcaggagttgatggtcgggcgttaagccttgtgcggcgacgatcatagaatgttgatcaattaaggcgtgaccaaatattctacattgcccgtaaactaatgagtcatgaatggtgacactgtcacttatatatgcaccctggctgatttcactattatcgatccagacgttatccgttgcgtaaacctctccccacagcacgctggtgccggtgatgcgcgtattaccggaaatcaccgctccgccgaacgcaatagcattctggtcgtaaatccagcaatttccttcttgtgctaacaccgtttcgcgatcgatccagccgccagcggttcctgctatcacatcgttaaaatcgctaatggcgataatctgccgtaataacacattttttttagtgccatcttcctgataactaaaggctcgctgttcttcacttagacgatatttgcgcatagcgttttcccacaggtgacttactataaccgtagcaaattctgcggctctggctatgctcgagaaaattccataaaatgcatttcaaatatactttataaattaaacaaaatgagtaagaagatgcagagcgataaagtgctcaatttgccggcaggctactttggtattgtgttggggacgatagggatgggatttgcctggcgctatgccagccaggtttggcaggtcagccactggttaggggatgggctggtgattctggcgatgatcatctggggattgttaactagcgcatttattacccgacttatacgctttccgcatagcgtgctggcagaagtgcgccatccagtgctgagcagttttgtgagtttgtttccggcaacgacgatgctggtggcgattggttttgttccgtggtttcgcccactggcggtgtgcctgttcagttttggtgtcgtggttcagttggcttatgccgcctggcaaactgcgggattatggcgcggatctcaccctgaagaagctaccacgcctggactgtatctgccgacagttgccaacaactttatcagcgcaatggcctgtggtgcgttgggctacaccgacgccggtctggtgtttttaggcgcaggcgttttctcatggctaagccttgaacctgtgatcttgcagcgtctgcgcagttcgggagaattacccacggcactgcggacatcactcggcattcagctcgctcctgcgctggtggcctgtagtgcctggttgagcgtcaacggcggcgagggtgatacgctggcgaaaatgctttttggttatggactgctgcaactgctgtttatgctacgtctgatgccatggtatctctcccagccatttaatgcttcattctggagtttctcgttcggcgtatctgcactggcaaccaccggtttgcatctggggagtggcagcgaaaatggatttttccatacgctggcggtaccgctgtttatctttaccaattttattattgcaatactgctcatccgtacttttgcgcttctgatgcagggaaaattgttagtcagaaccgagcgcgccgttttaatgaaagcagaggacaaagaatgatcattcgtgacgaaaactattttactgataaatatgaattaacccgcacacactctgaagtactggaagcggtgaaagtggttaaaccgggtaaaacgctggatctgggctgtggcaatggtcgtaacagtctttacctggcagccaatggttatgatgttgacgcatgggataaaaatgccatgagtatcgccaatgtagagcgcattaaatccattgaaaatctggataatttacacacccgagtcgttgatctgaataacctcacatttgatagacagtacgattttattctttcgactgtggtactgatgttccttgaggctaaaaccatccccgggttgattgccaatatgcaacgttgcactaaacctggtggttacaacctgattgtggcggcgatggataccgctgattatccatgtaccgtcggcttcccgtttgccttcaaagagggagaattacgtcgatattacgaaggctgggagagggtgaaatacaatgaagacgtcggcgagctgcaccgcaccgacgccaacggtaatcgtattaaactgcgtttcgccacgatgctggcacgtaaaaaatgacccgctaagaataaggcgcgtgaaaattccccacgctgagatgatttactgttcttcttttcggtaagcatattttttatcgaagggatgtgaaattaatcacagtagtcgaagttttttagcagcttaacttactgaaatttaactactgatgattgacttagcccctttttcggcattgactatgtcgtctgaaaaggggctgaaaaatttattttcaccaacactttttttgccacaacacgaagcggcgctttttgctataacttaaaaagtaatataatcatctcaggaaactattcatgcgtaccacatcatttgcgaaagttgcagctttatgcggcttgttggctctgtctggttgtgcctctaaaatcacccagccagataaatattctggttttttaaacaattactctgatttaaaagaaacaacctcagcaacaggtaaacctgttttacgttgggtagacccgagttttgatcaaagcaaatatgacagcatcgtctggaacccaatcacttattatccggtgccaaaaccttctacccaggtagggcagaaagttctggataaaattttgaactataccaacaccgaaatgaaagaagcgatagcgcagcgtaaaccactggttaccaccgctgggccgcgtagtctgattttccgtggggccattaccggtgtagataccagcaaagaagggctgcaattctatgaagtggttcctgttgcattagtggttgcggggacgcaaatggctacaggccaccgtaccatggatactcgcctctattttgaaggtgagctgattgatgcagcgactaataaaccggttatcaaagtcgttcgtcagggcgaaggtaaagacctgaataacgaaagtacgccaatggctttcgaaaatattaaacaagttattgatgacatggcgaccgatgccaccatgtttgacgttaacaaaaagtagttccagacgcgccatcgttagatggcgctttttatccggtgtgccgtaaaaccccatccttcagggcggggatataaggcgcggttttccacctgaccaggtgtttgctgttgttcaatgtattggcggatgacggatattggcgcacctccgcagctactggcaaaatagccaggactccacaaaacgcctttgtagtaatacctgactgcaatatctggtcgatctcgtcgcagtaacctacccgatacgcctttgaggctgtttaccagactggatatcgccagtttgggaggttagttaattaacaaatggacgtgatctggttcgccatccatttcaaccagttcagcttcaaaataagcacatacatttgaaaagtaagtgcgtagtttttctgtcgcgtcaaaaaatctggcgtcggtatctggtgacaaagaccaggtgaacatgcatcaggaaaacacaatgccttccacgccggatatcggtttctttattcacagaccaaagtatcatttgacctgtgaaacgattacaggcatttaaattccagttaagaccaggtggtcaacaggagtgtgaaatgaggcgcttcgcaggcgcatgtcgtttcgttttcaatcgtgctctggcacgtcagaatgagaatcatgaggccggtaataaatacatcccttacgggaaaatggcttcctggctggttgagtggaaaaatgccactgaaacgcaatggcttaaagattctccctcacagccattgcaacagtcactgaaagaccttgagcgggcttacaaaaacttcttccggaagcgggctgcttttccccgattcaaaaagcggggacagaatgatgcattccgctacccgcagggcgttaagctcgatcaggaaaacagccgtatttttctgccgaaactgggctggatgcgctaccggaatagccgtcaggtcacgggtgttgtgaaaaatgtcactgtcagccagtcctgcggtaagtggtacatcagtattcagacagaaagtgaagtatccactccggctcacccttcagcatcaatggtcgggctggatgctggcgtggctaaactcgccacgctgtcagatggcacagtctttgagcctgtaaacagttttcagaaaaaccagaagacgctggcgagacttcagcgacagttaagccgcaaggtcaaattcagcaacaactggcagaagcagaaacgcaaaatacagcgactgcattcctgtatcgcaaatatccgcagggactaccttcacaaagtcacaacggccgtcagcaaaaaccacgcaatgatagtcattgaggatttgaaggtcagcaacatgtcaaagtcagcagcgggtacggtcagccagccggggcgcaatgtccgggcaaaatcaggtttaaaccgttcgatactggatcagggctggtatgaaatgcgccgccagcttgagtacaagcagctctggcgtggcggtcaggtgcttgctgttccgccagcgtacacaagccagcgttgcgcgtgctgtggtcatacagcgaaagaaaaccgcctgtcacaaagtaaattcagatgccaggtatgtggatatacagcgaacgccgatgtaaatggcgctcgtaacattttagcggcggggcacgccgttcttgcctgtggagagatggtgcagtcaggccgcccgttgaagcaggaacccaccgaaatgattcaggcgacagcctgaacgtagcagggatcctcgtccttcagggcgtggaggatgtcaatatcggtttctgtcagcgattaaattcaacaccacgtaacaaacgcctccggcaattaatccccagaacgcagaaccaatcccgaccagcgtcaatccacttgccgttaccagaaatgccaccaccgccgcgtcgcgctcacgctcattatgcagcgcctgatacaaactgccgccaatggtactcaacagcgccagacctgccagcatctggatccaacttacgggcagggcagccatcatcccggtaatggcactaccaaacagacctgcgagcaaatagaaaatgcctgcaacggcagctgccagccaacgttgatctttatccggatgcgcttccgggctttggcaaatagccgcggtgattgccgcaataccgacggaataaacgccgaaaggggaaaaaaccagtgccagcaatccagtaaatacaattaatggcgaaacaggagccgaatatccagctgctttcattgctgcgatacccggtgcgttttgcgatgccatcgtcaccagaaaaagggggagtgcaacgctcaggctgtgagcaaacgaaaaatcaggggtaatataagtggggagaacgggtttaaagacaacatcagttgtgacaacgtcaccttgcgcgataacgatcacgatcccaataatcatcgcggcaattaccgcatagcgcggcgcaacggccttggttgccagccataccagcaacatacttccacacaacgtaaattgaccgtccagactggcaaacgcctgtaaaccaaagcgtaataaaatcccggcaagcattgccgccgcaagcgagtgcggaataatgcgcatcagacgagcaaagagtcccgttatgccgcagaggactattaacgcgttggtgacaataaaaacgccgatggcttcgttaagtgttagtccctgcaatccggtgaccaacaaagccgcgccaggcgttgaccatgcggtgagaacaggtacgcgataccataatgtcagagtcagcgtactgacgcccattgccagccccagcgccgtcatccagccagagatttgtgcagtggtggctccggcgacaatcgctgcttgccagattattgccgctgaactggcgtagccaattaataccgccagaaaccccgccagtagcgtgggtggaggaatagaaaacagacgcatagtcacctcgtgcgttatagcgtacaggcaccgtagcatttgtccgttataacgcacaagtgataaacttccgttttgccggaggagtcgcatggaaaatctcgctcgctttttatccaccacacttaaacaactacgccagcagcgcggctggagtctttcgcgactggcagaagcgacgggcgtttctaaagcaatgttagggcagattgagcgtaatgagtccagcccgacggtcgcgacattatggaaaattgccaccgggttgaacgtaccattttcaacatttatttctccgccgcagcccgctacgccttcagtttatgatccacaacagcacgcgatggtgatcacttcgctgtttccttatgatccacaactctgctttgaacacttctcgattcagatggcatctggtgcaataagcgaatcgacgccccatgagaagggggtaatcgaacatgtcgtcgtcattgatggacaacttgatctgtgcgttgatggggaatggcagacccttaattgtggggaaggcgttcgatttgctgcagacgtcacgcatatctatcgtaatggtggggagcaaaccgtacattttcattccctcatccattacccgcgcagttaagcgggaaaactatttcgcaacgtcgcgcttgtggctaaaatagccgccatttttcagctactggataagaatgtgaccgtatcttctcatcgacttgaactgttaagcccggcacgcgatgccgccattgcccgcgaagctattttgcacggtgccgatgctgtttatatcggcggccctggttttggtgcccgtcataatgccagtaatagcctgaaagatattgccgagctggtgccgtttgcccatcgttatggtgcaaaaattttcgtcacacttaacaccattttgcatgatgatgagctggaacccgcgcaacggctgattactgacctctaccagaccggtgtcgatgcgctgattgttcaggatatggggattctggaacttgatattccgccgattgaactgcacgccagtacgcagtgcgacattcgtacagttgaaaaagcgaagttcctctctgatgttggcttcacgcagattgtgctggcgcgagagctgaatcttgatcagatccgcgcgattcaccaggctacggacgcgaccattgaattctttattcatggggcactgtgcgtggcctattcgggtcagtgctacatttctcatgcgcaaacagggcgtagcgccaaccgtggcgattgctcgcaggcgtgccgtttgccatacacattgaaagacgatcaggggcgggtggtttcctatgaaaaacatctgctgtcgatgaaagataacgatcagactgccaacctcggcgcgctgattgatgctggtgtacgctccttcaagattgaagggcgttacaaagatatgagctacgtgaagaatatcaccgcccattatcgccagatgcttgatgccattattgaagaacgtggcgatctggcgcgcgcttcatcaggtcgtactgaacatttctttgttccatcgacggaaaagactttccaccgtggtagcacagattattttgtgaatgcccgtaaaggcgatattggcgcgttcgattcgccgaaatttatcggcctgccggtaggcgaagtattgaaagtggcgaaagatcatctcgatgttgccgttaccgagccactggcaaatggcgatggcctgaacgtgttgattaaacgtgaagtcgtcggttttcgtgccaatacggtcgagaaaaccggagaaaatcagtaccgcgtctggcccaatgaaatgccagcagatttgcacaaaaattcgtccacatcacccactaaaccgtaatcttgatcataactggcagcaggcactgacaaaaacctccagcgaacgtcgggtggcggtagacattgaactgggcggctggcaggaacaactgattctgaccctcaccagtgaagagggtgtcagcatcacgcatacgctggacgggcagttcgacgaagccaataacgccgaaaaagcaatgaacaatctgaaggatggtctggcaaaactggggcaaaccctctattacgcccgcgatgtgcaaattaatttgccgggggcgctgtttgtaccaaacagtctgttaaaccagttccgccgtgaagctgctgacatgctggatgctgcgcgtcttgccagttaccagcgcggcagccgtaaaccggttgctgatcctgcgccggtttatccgcaaacgcatctgagtttcctcgcgaacgtatacaaccagaaagcgcgtgaattttatcatcgctatggtgtgcagctgattgacgcggcgtatgaagcacatgaagagaagggcgaagtcccggtgatgatcaccaagcattgtctgcgctttgcctttaatctgtgcccgaaacaggcgaaaggcaatatcaaaagctggaaggcgacgccaatgcaactggttaacggcgatgaagtattaacgctaaagtttgattgccgcccatgcgagatgcacgtcattggcaaaatcaaaaatcacatactgaaaatgccgttaccgggaagcgtagtggcatccgtaagtccggatgagctgctgaaaacattgcctaagcgaaaagggtaaaacgccagttttctggttactcacaactcattgaatctgcatgatattgcctgccgggtaaggtgtcacgccgcatccggcaacaaatgactcaacgttgtcccgcttctggtttgcgcgatttttgccagtaaaaatgctcgcgcaaaccttccgccgactcttccgccacagcacgcaattcatcgctgtccgcttcatgacgcagctgatgatccacattctttacccacacaaattcatgtcctttgtgccctgccatgagttgtcctgagaacagcgcacacgttaataagacaaccgataacgccttcgtaaacatcctgccacctttttcttaccttttgccgctatgatgccgatcgtttcttgaggttattattcagttttgcaaattagcgcaaagaaattctggaatcttccttcctgattttgcatggcattctgccgttgcggcgatttagtgctattttcgagcaaattacacacggaggtaaacactaatgtttactttgttgatatactcagcggcagggaggcgatgtgaaacaaagcgagttctgacgttggctcgaatctcagggcgtcgatgtagcgaatggcagcaaccatttgaaactcaggtttcatgggaggcgcagtgtcatgccgcgtcactcctgcgtaaagcaatcctgaaacaactcggtttgagttaatcgccaattaaaaaggttaatgacatgcgagagacagtcgaaattatgcgttatcccgtcactcttacacccgcgccggaaggcggttatatggtttcttttgtggatatccctgaagcgttgacgcagggcgaaactgtcgctgaagcgatggaagcggcaaaagatgctttactgaccgcatttgatttttattttgaagataacgagcttatcccgttaccttcgccattaaatagtcatgatcactttattgaagtacctttgagcgtcgcctctaaagtattgctgttaaatgcttttttacagtcagaaatcactcagcaagagttagccaggcgaattggcaaacctaaacaggagattactcgcctatttaacttgcaccatgcgacaaaaatcgacgccgtccagcttgcggcaaaggcgcttggcaaagagttatcgctggtgatggtttaattacagttaacgaaaagttgtcatttttaacaactgatatagactgccgaatcatctgcacataattacgattcgataatgaaaaaataccagcagcttgcagaacaattacgcgagcagattgcgtcgggtatctggcaacccggcgatcgtttgccttcgttgcgtgaccaggtggcgctttcaggcatgagctttatgactgtcagccatgcctatcagttgctcgaaagtcagggatatattatcgcacgaccgcagtcgggttattacgttgcgccacaggcaataaaaatgccgaaagcgccagtcattccagtcactcgagatgaagcagtcgatatcaacacttatatttttgatatgttgcaggccagtcgcgatccgtcggtcgttccgtttgcctcggcctttcccgacccgcgacttttccccctccaacaactaaaccgctcgctggcgcaggtaagcaaaaccgccacagcgatgagcgtgattgaaaacttaccgccaggaaacgcagaactgcgtcaggctattgctcgtcgctatgccttacagggcatcaccatttctcctgatgaaattgtcattactgccggggcgttagaggcattaaacctcagtttgcaagcggtaactgaaccgggcgattgggtgatagtagagaatccttgtttctacggtgcgttgcaggcgctggagcggctacggctgaaggcgttatcggtggcgacggatgttaaagaagggatcgatcttcaggcgctggaactggcgttgcaggattatccggtgaaagcgtgctggctgatgactaatagccagaacccactcggatttaccttaacgccgcaaaaaaaagcacaactggtggcgttactcaatcagtacaacgtaacgctgattgaagatgacgtttacagcgaactttattttggacgggaaaaaccgctgcctgcgaaagcgtgggatcgccacgatggcgttttgcattgctcttcgttttcgaaatgtctggtgcctggttttcgtattggttgggtcgccgccggaaaacatgcacgtaaaattcaacgcttgcagttgatgagtacgctttccaccagctcaccgatgcaacttgcgctggtggattacctttccacgcgccgatacgacgcccatcttcgtcgcctgcgtcgccagcttgcggaacgtaaacaacgtgcctggcaggcactgctgcgttatctgcctgcggaagttaaaattcatcatagtgacagcggttattttctctggctggagctccccgagccgttagatgccggcgaattaagcctggcggcactgacgcatcatatcagtattgcgccgggtaaaatgttttctaccggtgaaaactggtcacgtttttttcgttttaataccgcgtggcagtggggagaacgtgaagaacaggcggtaaaacaattaggcaaacttattcaagaacggctgtaatagcgtttaatttaattcctcttagattgggtaatatgaatttcgaatagcagtcatatttcctaaccccttgtctatactccagaagataaccttacagacggcataatgcgcggtagctcacaacctgattaaattttctcaggggcgaaggtgtgcctgcaagccgccgtctatggttaaacaaggagatatttttacggcacggcggctgaacaattaattacgacaggagtaagaccttatgagcaagacatttgcccgcagcagcctgtgtgcgctcaccatgacaataatgaccgctcacgccgccgaaccacctaccaatttagataaaccggaagggcgactggatattatcgcctggccgggatacatcgaacgcggacaaactgataaacaatacgactgggtaacgcaatttgaaaaagagacaggctgcgcggtgaatgtgaaaaccgccgcgacttccgatgaaatggtcagtctgatgaccaaagggggttacgatctggttacggcatccggcgatgcctcgctgcgtttgattatgggcaaacgcgtgcagccgattaataccgccttgattcccaactggaaaacgctcgatccgcgcgtggttaaaggcgactggtttaatgttggcggcaaagtttacggcacaccttaccaatgggggccgaacctgctgatgtacaacactaaaaccttcccgacgccgccggatagctggcaagtggtttttgttgagcaaaatctgccggacggcaagagcaataaaggccgcgttcaggcttatgatggccctatctacattgcggacgctgcgttgttcgttaaagccactcagccgcagttgggcatcagcgatccgtatcaactaaccgaagaacagtaccaggcggtgctgaaagtgctgcgcgctcaacacagtttgatccatcgctactggcatgacactaccgtgcaaatgagcgatttcaaaaacgagggtgtggttgcttccagtgcctggccctatcaggccaacgccctgaaagccgaaggccagcctgttgctaccgttttcccgaaggagggtgttaccggttgggctgataccaccatgctgcatagcgaagcgaaacatccggtttgcgcctacaaatggatgaactggtcattaacgccaaaagtgcagggcgatgtggcggcctggtttggctcgttaccggtagtgccggaagggtgtaaagccagtccgttattaggcgaaaaaggttgtgaaaccaacggttttaactatttcgacaaaatcgccttctggaaaacgcctatagcagaagggggcaagtttgttccctacagtcgctggacgcaggattacattgccattatgggcggtcgctaacttcgctggggtgctttatgacgtacgcagtggagtttgacaacgtctcgcggttgtacggtgacgtgcgcgcagtagatggcgtcagtattgcgataaaagatggtgagttcttctctatgctggggccgtccggctccggcaaaaccacctgcctgcgcctgattgctggcttcgaacagctttccggcggggctatctctatctttggtaaacccgccagcaatctgccaccgtgggagcgggacgtgaatactgtctttcaggactacgcgctatttccgcatatgtcgattcttgacaatgtcgcctatgggctgatggtcaaaggcgtgaataaaaagcagcggcacgcaatggcgcaagaggcgctggagaaagtggcgttggggtttgtacagcaacgtaaaccgtcacaactttctggtggtcagcgccagcgggttgctatcgccagagcattggtgaatgaaccgcgcgtattgctgttggatgaaccgctcggcgcactggatctcaaattgcgtgagcagatgcagctggaactgaaaaaactgcaacagtctctcggtatcacttttatcttcgttacccacgatcagggcgaagcgttatcgatgtccgatcgtgtggcggttttcaataatggacgcattgagcaggtcgattccccgcgcgatctctatatgcgcccgcgcacgccgtttgttgccggattcgtcgggacatccaacgtttttgatggactgatggcagagaaactttgtggcatgacgggaagcttcgccctgcgaccggaacatatccgcctcaacacccctggtgaactgcaggccaatggcacgatccaggcggtgcaatatcagggcgcggcaactcgttttgaactgaaattgaacggcggtgaaaaactgcttgtgagtcaggccaatatgacaggcgaagaactgcctgccacgctcacgcccggacaacaggtgatggtttcctggtcgcgtgatgtgatggtgccgctggttgaggagaggtgaatggcgatgaatgtattgcaatcaccttcacgtccaggtctgggtaaggtgtccggtttcttctggcgtaatccggggctggggctgtttttactgctgcttggcccgctaatgtggtttggcattgtctatttcggctcgctgctgacactgttatggcagggattttatacttttgacgatttcaccatgtcggtaacgccggaactgacgctggcgaatatccgtgcgctgtttaatccggcgaattacgacatcattctccgcacgctgactatggctgtggcagtcactatcgccagcgccattctggcttttccaatggcgtggtatatggcgcgctataccagcgggaaaatgaaagcttttttttatattgcggtaatgttgccgatgtgggcgagctacattgttaaagcctatgcctggacgttattgctggcaaaagatggcgtggctcagtggtttttacaacatcttgggctggaaccactgctgactgcgttccttacattacctgcggtgggcggaaatacgctgtcaacttccgggctggggcgctttctggtgtttctctatatctggttgccgttcatgatcctgcccgttcaggcggcgcttgagcgtttgccgccgtcattgttgcaggcgtcggctgatctcggcgcacgtccacgacaaacctttcgctatgtggtgctgccgctggcaatcccgggtattgccgctggctctatctttaccttctcactcacactgggcgattttatcgtcccgcagctggttggtcctccaggatattttatcggcaatatggtttattcccagcagggggcgattggcaatatgccgatggcggcggcattcaccctggtgccgattgttctcatcgcactgtacctggcgttcgtgaaacgtctgggagcgttcgatgcactctgaacgcgcaccgtttttcctcaaactggcggcctggggcggcgtggttttcctacattttcccatcctgattatcgccgcttatgcgtttaacactgaagatgcggcgtttagttttccaccgcagggcctgacgctgcgctggtttagcgtggcagcacagcgtagtgatattcttgatgccgtgacactgtcacttaaagtggcggcgctggcgacattaatggcgctggtgttagggacgctggcagctgccgcgctgtggcgacgagactttttcggcaaaaacgccatttcgctgttactgctgctgcccattgcgctgccgggcattgtcactggtctggcgctattaaccgcttttaaaaccatcaatctggagccgggatttttcaccatcgtggtcggtcatgcgactttttgcgtagtggtggtgtttaacaatgtcatcgcccgttttcgccgcacctcgtggagtctggttgaggcgtcaatggatcttggggccaatggctggcaaaccttccgctacgtagtgttgccgaatctcagttcggcgctactggcaggaggaatgctggcgtttgccttgtcgttcgatgaaatcatcgttacgacttttacggcaggtcatgaacgaacgttaccgttgtggttgctcaatcagcttgggcgaccgcgtgatgtaccggtaactaacgtggtggcactgctggttatgttggtaacaaccttgccgatcctgggggcctggtggctaacccgcgaaggcgacaatggtcaataaccactgatacaggaatatgctatgcaacataagttactgattaacggagaactggttagcggcgaaggggaaaaacagcctgtctataatccggcaacgggggacgttttactggagattgccgaggcatccgcagagcaggtcgatgctgctgtgcgcgcggcagatgcagcatttgccgaatgggggcaaaccacgccgaaagtgcgtacggaatgtctgctgaaactggctgatgttatcgaagaaaatggtcaggtttttgccgaactggagtcccgtaattgtggcaaaccgctgcatagtgcgttcaatgatgaaatcccggcgattgtcgatgtttttcgctttttcgcgggtgcggcgcgctgtctgaatggtctggcggcaggtgaatatcttgaaggtcatacttcgatgatccgtcgcgatccgttgggggtcgtggcttctatcgcaccgtggaattatccgctgatgatggcagcgtggaaactggctccggcgctggcggcagggaactgcgtagtgcttaaaccatcagaaattaccccgctgaccgcgttgaagttggcagagctggcgaaagatatcttcccagcaggcgtgattaacgtactgtttggcagaggcaaaacggtgggtgatccgctgaccggtcatcccaaagtgcggatggtgtcgctgacgggctctatcgccaccggcgagcacatcatcagccataccgcgtcgtccattaagcgtactcatatggaacttggtggcaaagcgccagtgattgtttttgatgatgcggatattgaagcagtggtcgaaggtgtacgtacatttggctattacaatgctggacaggattgtactgcggcttgtcggatctacgcgcaaaaaggcatttacgatacgctggtggaaaaactgggtgctgcggtggcaacgttaaaatctggtgcgccggatgacgagtctacggagcttggacctttaagctcgctggcgcatctcgaacgcgtcagcaaggcagtagaagaggcgaaagcgacagggcacatcaaagtgatcactggcggtgaaaagcgcaagggtaatggctattactatgcgccgacgctgctggctggcgcattacaggacgatgccatcgtgcaaaaagaggtatttggtccagtagtgagtgttacgcccttcgacaacgaagaacaggtggtgaactgggcgaatgacagccagtacggacttgcatcttcggtatggacgaaagatgtgggcagggcgcatcgcgtcagcgcacggctgcaatatggttgtacctgggtcaatacccatttcatgctggtaagtgaaatgccgcacggtgggcagaaactttctggttacggcaaggatatgtcactttatgggctggaggattacaccgtcgtccgccacgtcatggttaaacattaagttagatgttagtggctgttataggacggccactatcgttttaggttctgagtttaatggcggttaagtattagaatgattacattaataactagcgtaaaaattaggctaaatgtttgatggcgatttttcatcctgtcacagttgattagcataaggctttagagtatcgttattaaactaataatttataagtagaagtattaacaatgaaagttcaattgtacaaattcacggaagataaaaataaaacccttaccttcagatggacgaaaaaacactttgagttttgtatggataataaaatctttttaaatcataaggggaagaagtcgtataaagaaaggaatttatttcttttctcaaaaggtgacaagataacaattgaagataatgttattgctgaagaatattcaacaatgcctgtgaaaaatttctccagtgtcggcgctttttcatttccgacctgccatttttcagggaatatacgtataggtcgattttgtagtattgcatcaaatgtaaaaataatgggtggaaatcatcctttgaatcgttttactactcacatgatgacttataacggtgaatttgataagtttgctatgagtgaatttgaacgtagctggacattgaaaccattcattaccaaacctgaaaatccgattataggaaatgatgtctggataggaaatgatgttgtattgaaaggtggcatcgcaataggtgatggtgctgttattgctgccaattccgttgttaccaaagatgtgcccccatatgccatagttgcaggagttcctgcaaaaataatcagatttaggtttgattcaaatgttattgatgaactgttgagaataaaatggtggaattataactactcagatcttccggataataacaagtgtgatgatataaattattttgttgaagagatgaatcgattgatatcagatggaaatattcaagagagggactataaaaaattcaatctttctgaggtattcagaggcctataattatctgttttgcatgataaatgggcaagataaccagggcggggtttgcaatttcaatggggcagcgtcatcaaggaggttgcaaacatcctgccatgcatatactttacgccatctttttatatttacgttattccttgaaagtataaagcatttatagactcccgcgcgtataaagtattcatgatagaaaaatgtgaaaacaagattccgtttgaatcagtaagctgtttgtatagacgacagtagggggatgttttctactcatttcaatgtagatgccagcaaaaagaagtaaatattaaggataatgttgtaaacctggagagtatgagaagatcttgcgtactgtcagagagttgatttctctgacagtacgtgctgcgtgcaaaatcactacatcaaataaaccagccaaatctcatagagataagagtaaacaaaccaacagcagcaaagacatttatcagtactacagttctactggaaacattcatttttgccaccttttatcattgcccctatgtgtatagtacgggttaagaaaatccgcaataatactcattctgaagatggataagggcaagttgctgtttgatgattttttctcaaactggtgaaaaaacttgatgcacgtcaaaaatgacgcatatttgcgcgcgttttattcatctgcctggacgcccgtacatgtctctctatcaacatatgcttgttttttatgcggttatggcagcaatcgcatttcttatcacctggtttctttctcacgataagaaacgcatccgtttcttaagcgcctttctggtgggggcaacatggccgatgagtttcccggtggcgctgttgttttcactgttttaaatcttactcactggcttgacggcaccacgcagacttatatcatttggatgaatcgataaatttcacaagtggttaaggagaaagtatgtcgcatctggatgaagtcatcgcgcgcgtggatgccgcgattgaagagagcgtcattgcccatatgaacgaattattaatcgccctgagcgatgacgcggagttaagtcgggaagatcgctacacccagcagcagcgtttgcgcaccgctattgctcatcacggtcgcaagcataaagaagatatggaagcgcgccacgaacagttaaccaaaggcggcaccatcctctgattaaaatgagcgtctggctaccaaccaggcgccaaccacaagtaaaattgcgccacaaattgggccgaacaacgcccgtagtggtacgccatgactgcggaagatatccagcatcagaccgccaattagctggctggcgaccagtactgcaatagttgtcgccgctcccacattctgatatccgctgatactggcgaagacaaaaaacgatcccagcaagccgggtataagtgtccaccagcgcacgctggacaccagttcgccaaaccccgccatgccttgtttaaaccataaaatagaaacaaagagcacaatccccaccagtgagttcagcaacatggcgatgagaatggtagaggaggtctgggtgatgcgcaccatcagcgtgttctggactaccagaccaattccggcggcaatcaaaaaagcaagggtgagcgactgattcatccaatcgcgtccggttcagtgcgttcgtcgagttgcaactgcataaatgtcagatccagccagcgcccaaatttagtgcccacctgcggcatttgtgcggtgacgacaaatcccagcgactggtgcagatgcagcgaggcctgattttgcgattcgatcccggcgaccatgacatgcttcccgcaatcccgcgcttcatcaatcaatcggcttaacaatttacgccccagacctttgccctgatgatcaggatggacataaaccgaatgttccacggtatggcgaaaaccatcgaaactacgccagtcgccaaacgaggcatatcccgtcactacgccatcttcttcactcaccagcaccggataacctgctatggtccgcgcttcaaaccaggcaatgcggttatctgcatcaaccgtttggtcattccagatagccgccgtatacaacacggcgtggttataaatttccgcaatggcagcacaatcggctttgcgggcaaaacggatggacatgtctggcctcgataaaataatgatgatgatgttatcaatactatcgaaaacagcccgaagcaacggattcctcgatgaaattattgcgtgttgcagaggggatgtgacggctgcaaacaaaaccaatcccgtgagcctgctactattgatggattcatgccaaaagcacaggagagcattatggggcaacaaaagcagcgtaatcgacgttgggttctggcctcgcgtccacatggcgcaccggttccggagaatttccgtcttgaagaagatgatgtcgccacaccgggtgaaggacaggtgttactgcgcacagtttatttgtccctggacccgtatatgcgtggacgtatgagcgatgagccatcttattcaccgccggttgatattggcggcgtgatggtcggcggtacggtgagccgtgtcgtggagtcgaatcatcctgattatcagcctggcgactgggtgctgggctacagtggatggcaggactatgacatatccagtggtgatgatctggtgaaacttggcgatcatccgcaaaatccatcgtggtcgctgggtgtgctggggatgccaggctttaccgcttatatggggctgctggatatcggtcagcctaaagagggcgaaacgttggtggtagctgcggcgacaggaccagtgggggcgacggtggggcaaatcggcaaacttaaaggttgcagggtggtgggggttgccggtggcgcggaaaaatgccgccatgctatcgaggtgctgggcttcgatgtttgtcttgatcaccacgcggatgattttgccgaacaactggtgaaagcgtgcccaaaaggtattgatatctattatgaaaacgtgggcggtaaggtatttgatgcagtgctaccattacttaatacatctgcgcgcattcccgtttgtggcttagtgagcagctataacgctacagagctaccacccggtccggatcgtttacccctgttgatggcaacggtgctgaaaaaacgtattcgcttgcaagggtttattatcgctcaggattatggtcaccgcatccatgagtttcagaaggagatggggcaatgggtgaaagaggataaaatccactaccacgaagatattactgatggtttagagaatgcgccacagacgtttatcggcctgctgaagggtaaaaacttcggcaaagtggtgatccgcgtcgcgggtgatgattaaagtttcaacggcggcgtaagccgccataaaaatccaggcaaaaagcttattttcagctttaattaactaaccacgtcattgttctgctgctaataacaacaaaggtgggtggtttatgattattcactttaatacaccaggtgaactccttctgccgtgcaggcagggttggacagaaaacacgcgaaggaattaaaatgcctggaatgggaaaaatgaaacatgtcagtttgactctgcaggttgagaacgacctgaaacatcagcttagtattggcgcattaaaacctggcgcacgcctgattactaaaaatctggcggagcaattaggtatgagtattacacctgtgcgtgaagcattattacgtctggtttcggtgaatgcgctttctgtcgcacctgcacaagcatttacagttccggaagtggggaaacgtcaattagacgaaatcaatcggatccgctacgaactggaattaatggcagttgctctggctgttgaaaacctcaccccgcaagacctggcggaactccaggaattgctcgagaaattacagcaggcgcaagaaaagggcgacatggaacaaatcattaatgtaaacaggctatttcgcttagcgatttatcatcgctcaaatatgccatcctgtgtgagatgattgagcaactgtgggtcaggatggggcctggtttacattatctctatgaagcgattaatccagcggaattacgggagcatatagaaaactatcatctgttactcgctgcgttaaaagcaaaagacaaagagggatgcagacattgtcttgctgaaattatgcaacaaaatattgctattttataccagcaatacaatcgttaaagtaaatgcccggcaaataccgggcatcaaggtaattactcaaatctccacgcaatattcatgccggcaccataatttcgtccgggcgaaggttcgtaatatcgcccgtttgactcattgacaatgacagaaccaacgtattctttatcgaataaattatcgacacgaccaaataaatccacagttaaattgtggtaattgtatttatacccggtgaataagccgacgagagtataagacggcgcttttgccgtattttcatcatctgccataatatcgcccatataacgcgcttccgtgcctgcataccaaccatcttccggtacataacctatcgacgcaaagcccatattacgggcgatccctggcatccggttaccgttacaatcctgttcattgcaaacattgctgcgataggtcgcatcaagccaggtccaggacgcttttacgcgaaaatctcccgcgaaacgttgatcccatgccagttcagcgccttgacgacgggtctttccggcatttttgtaagtcgtacgcccaccgctactgctatcgacaacaatttcatcatcagtgtcggtctgaaacaatgcgagactaagcagcccatcaccaatacgcgttttactgccgatctcaattgtatcgttggtggatggttttaaaccaaagttcataccgctttgcccatcagcgcgataagacagctcattaatcgtcggcgtttcaaaacctcgcccggctgccagatagatattccaggcatcggtcattgcatattttaacgaaccggcaggtagccatttatgataactggcatcaccgctgtcatcgccgttacccggagtaacgtaatgatcattggaatcaaaccacacggagctgtagcgcacgccagcatccagcgacagtttttcgctcagctgccactgcgtctgtaaatagggatcgatgttccacatcagattgcgttcgtcgcgacgcaactcacctttttgcccgtactccggcatgccgctattcaggcggaagttattgtagcccttgcggttttcactcatgttttcgtagttcaggccggtagtgaacgtgaccggaacgcccagttcaccacggtgtgtccagcggctgtctatcccctggtaatggcgttgcagggtaatcacgccgcccgcatgtgacgggttaagttgtggtgccatgggtattgactgatactgggtcgtttctcgctctccggcatacatcatcacactcatatcatcttgcgcgctcaggctacgctcatagcgcaacccagcctgagtttgcttgatggtttttcgcgtgtcgtactgttctgcacgaggcgcttgttgtggattagccttccattctgctttggttagcccacctgggtcatctgctttgatatccacactattgaaaatcagacttaatttgctggcttcatcaatgcgtacgcccagtttggcattagctaaatttttctgtgcgccactatggtcacgatagccgtgggtcgtaaaacgcgtggttgagacggtgtaatcgacatcgccaggctgtgtgccgtctcccgttgcgcccgttgctttcagcccatagcgccagctgccaaaactgccgtagtaactactggcttcaatggttggtggctgttgtccggtctgggtggtgacattcattaccccaccagacgcgttgccatacagggcagagaaggggccacgcagcacttccacattttgcacactgcttaaatcgatgttggatgtttgcccttgcccgtcgggcatggtggcgggaataccgtccacatacaggcgaataccgcgaataccgtaagtggagcgggagccaaatccgcgaatcgacagctgtaaatcttgcgcatagttctgccggttttgtacctgcaaaccaggcacgccggtcagtgattcggacaagttaatgcgcggtgttgccaggcgcatctcctcgccatccaccacgcttactgctgctggggtatccagttctgaaaccacctgcggtgcggcactgacaatcatagtctgttcatcagcggcaaaaacaacgggggaaaggacaagcagtgcgggcaaaacggtctgtcggacggaaaaaatcttcatgaaaaaagccaggttaagaatgggaaaacgctgtcatggtaataaaattgtaaatttatggaaaacgaaacggcacgatacgttaattaattgagaaaattgtagtcgtaacggcaagaaatgctccacatttgagaaaataatgattaccattcccatttataacaagagcgtaacgatgattacgcttagcgaagcattgtgaagcagcaaaaatattggttcatcaaagggagtcgtcatgcatttacgtcatctgttttcatcgcgcctgcgtggttcattactgttaggttcattgcttgttgcttcatcattcagtacgcaggccgcagaagaaatgctgcgtaaagcggtaggtaaaggtgcctacgaaatggcttatagccagcaagaaaacgctctgtggctcgccacttcgcaaagccgcaaactggataaaggcggcgtggtttatcgtcttgatccggtcactctggaagtgacgcaggcgatccataacgatctcaagccgtttggtgtcaccatcaataacacgactcagacactgtggtttggtaacactgtaaacagcgcggtcacggcgatagatgccaaaacgggcgaggtgaaaggccgtcaggtgctggatgatcgtaagcgtacggaagaggtgcgcccgctgcaaccgcgtgagctggtagctgacgatgccacgaacaccgtttacatcagtggtattggtaaagagagcgtgatttgggtcgttgatggcgagaatatcaaactgaaaaccgccatccagaacaccggtaaaatgagtaccggtctggcgctggatagcaaaggcaaacgtctttacaccactaacgctgacggcgaattgattaccatcgacaccgccgacaataaaatcctcagccgtaaaaagctgctggatgacggcaaagagcacttctttatcaacattagccttgataccgccaggcagcgtgcatttatcaccgattctaaagccgcagaagtgttagtggtcgatacccgtaatggcaatattctggcgaaggttgcggcaccagaatcactggctgtgctgtttaacccagcgcgtaatgaagcctacgtaacgcatcgtcaggcaggtaaagtcagtgtgattgacgcgaaaagctataaagtggtgaaaacgttcgatacgccgactcatccaaacagcctggcgctgtctgccgatggcaaaacgctgtatgtcagtgtgaaacaaaaatccactaaacagcaggaagctacccagccagacgatgtgattcgtattgcgctgtaatagatatggcgagggtgaaaacggtgagacttgcctgccttttatcacggcgtatccggcactttcgtcagtaatctgaatttgcccggcacgtagccgggcaattttgcaattaactcgccgtttcaggcttaaacacaatttcctgtttttcttcatcttcctcgacgactggcgcagtgctgtgaatttcagcaacgcgtttgcgcacaccaaaccagcctataaccagcagaataccgataatcggcagcgccgcgatagtataagtcccgttcgggtaatcgaacgccatcagcacaaggacactcagtaaaaacagtaatgtcagccaggaagtgaagggcgcgccaggcagtttaaaactgacatccgctgctttgccttctttaatcgctttacgcaggcgcatctggcacacgatgataaacgcccatgaagcgatgattcccagcgacgcgaagttcaacacaatctcaaatacgcgcgacggcaccagatagttgaggaatacgccgacgacatacacaaccagtgtcgctagaatcccggcatacggcacatgctgacgactcattttcgccataaaactcggtgcggaaccgcccatcgccattgagcgcagaatacgtccggtgcagtacagacctgagttcaggctggagagggcagcggtcagcaccacaatgttcataatgctgccgatatatggcacacccagtttagagaaaaacgtcacgaacggactttgccccgcctgatacgcgctccacggcaataacataaccagcaacaccacggagccgacgtaaaacaggccaatacgccaaatcacactgttaatggctttaggcaccatggtctgcggatctttacattctccggcagctgtacccaccatttcaatggaggcaaaagcaaacactacgccctgaatcaacaccagcgcaggcagcaaaccgtgggggaagaagccgccattatcggtgattaaatgaaagccagtggtgttgccatccagcggctgaccactaccgaggaacactgtacccacgaccaaaaaggtcacaatggcgagcactttaataagcgcaaaccagaactccatctccgcaaaccatttcacaccgatcatattcatggtgccaacgatggtaagtgcagcgagcgcaaagacccactgcggcacgccgccaaacgcaccccagtaatgcatatacagagcgacggcggtaatatcaacaatccccgtcatcgcccagttgatgaagtacatccagccagcaacataagcggctttctcacccaaaaactcacgggcataagagacaaaactgccactggaagggcggtgtagcaccagctcacccaatgcacgcagaataaaaaacgaaaacaagccacaaattaaataaaccagtgccagtgctggacccgccatttgcagtcgggctcctgcacctaaaaacaagccggtgccaatcgcgccgccaatggcgatcatctgtacctggcgattgcccatcgctttgtgatacccctcttcgtgggcattaagccagcggcgtttcgcggcgtgttgatctgaagtgtcggtgtcgtgtttactcattgctctccctgattgctttaatgaaaaagtcatataagttgccatgaacaatgtttattcatcctggcgatgatagttatcaccattattctttatgggtataaaactatcggcgcagcatcctacccgttatcgataaacgatgcaaaacatccccttacaatcctgaaggggattaatacaactgacgaaaaaatgacaaatccttttgctggttaacctgtgtactgtcctacacttaatctttaaaagattgtgaggggcatatgattaaggtgtatggcgtacccggatggggctctacaatcagtgagctgatgctaacactggctgatattccttatcagttcgttgatgtcagtggttttgaccacgagggaacttcacgcgagttattgaaaaccctgaacccgttgtgtcagattccgacactggcgctggaaaatgacgagattatgacggagacagcggcgattgcattgatggttctcgatcgtcgcccggaccttgcgccaccggttgggcgcgccgaacgtcagcagtttcaacggctattggtctggctggttgctaatgtctatccaacattcactttcgccgattaccctgagcgttgggctcctgacgcacctgaacagttaaagaagaatgttattgaatatcgtaaatcgctttatatctggctgaattcacaattgaccgctgaaccttatgcgtttggtgagcaactaacgctggtggactgttatctctgcaccatgcgcacatgggggccggggcatgaatggtttcaggataatgcgcagaatatcagcgcgatcgctgatgctgtatgtcagttaccgaaattacaagaagtattaaaaaggaatgaaattatttgagtgggataccagaagattatgttatttattattcagtaactttatccacaatgatgggtgtaattaattaaattcatgttatgttttttgatttatatcactctccccttcattcagcttgtctatttcatttcctctgaaaagaaactaactattcacattgtgcagatgtttcacttgttatcacaggtattctataatctcaaaaagtttttaatgatggatatgctcggagttggagatgcaattaatattaatacaaataaaaatatccggcaggtatgctaaaaggataaatggcgttctctgtatttattcgcaattatctgtaggacaaatatggagagcttgatgagtcagagctaaaacagcaattgattaataaacatgttgatttattcaagaaaatggatgtattttaaatgttgattcttaatataacctaatcaatagattatcaagtgagagctacacattattggaggggcaggggaaaacaccattttgggaacaatgcatcaggtactcttaccactgaagcaagatcatccggcaccaggtggtggtgcagtgctttggaaatggtcccctcgggggagttgtcattattttctatgctatttgcttattatattcatcaggtgaatttaataaattcctaatttgaaatatccactattaagccagtgtttaacgacgttaagatggcaatgtgcagatcatgttatcagggtggggcggtagcgtatattccttatacaaaccatcattcatttcaatgattgttattgaattatttattgttgtgaataaaaagacattatgaatattggtttgactttgcatatcaggttttttattactcgctgtaatgtacgagcctgtcgtgaataacgtcgagaacccatccgttgcgtttgtgattattttgttgactaaacagacacccgtttctctgaagtaaaatcccagactaaatcatcacataaccatgacatttttctgatattccccggtaacgccagatgtcgactcgcttatctcatccgcccgacatgttgtacatgcaatatgtgcggattattattcattttcacggaggttgctatgtcaaccggattacgtttcacactggaagtggacggcctgccgccggatgcttttgcggtggtttcctttcatctgaaccagtcactctcttcgctcttttccctcgatctctccctggtcagccagcagtttctctcccttgaatttgcgcaggtgctggacaaaatggcctacctgacgatatggcagggcgatgaagtacagcgccgggtgaaaggcgtggtgacctggtttgaactcggggagaacgacaaaaaccagatgctgtacagcatgaaggtgcacccgccgctgtggcgtgccggtctgcgccagaacttccgtatcttccagaacgaggacatcaaaagcatcctcggcacgatgttgcaggaaaacggggtgaccgaatggagtccgctgttcagcgagccgcatccttcccgtgagttttgtgtccagtacggtgagactgattacgatttcctgtgccggatggcggcggaggaaggcatcttcttttatgaggagcatgcttacaaaagtaccgaccagagcctggtgctgtgcgacacagtccgccatctgcccgaatcttttgaaatcccatggaacccgaacacccgtaccgaggtgagcaccctctgcatcagccagttccgctacagcgcacaaatccgcccttcttccgtggtgaccaaagactacacctttaaacgccccggctgggccggacgttttgatcaggaaggccagcaccaggattaccagcgcacacagtatgaagtgtatgactaccccggacgtttcaagggggcccacgggcagaactttgcccgctggcagatggatggctggcgaaacaacgccgaagtggcgcgcggaacaagccgttctccggagatatggccgggacggcgaattgcgctgacggggcatccgcaggcgaacctgaaccgggaatggcaggtggtggcgagcgatcttcacggcgaacagccgcaggcggtaccgggacgcagtggttcaggcaccacgctgaataatcactttgcggtgatcccggcagacagaacatggcgaccacagccgttgctgaaaccgctggtggacggcccgcagagcgctgtcgtgacgggaccggcaggcgaggaaatcttctgtgatgaacatggccgcgtgcgggtgaaatttaactgggaccgttataacccgtcaaaccaggacagttcatgctggagccgtgtggcacaggcgtgggcaggcaccggattcggtaacctggcgataccgcgtgtgggtcaggaggtgattgtggacttcctcaacggcgatccggaccagccgatcattttggggcgcacctaccaccaggaaaaccgcacacccggcagcctgccgggaacaaagacgcagatgaccattcgttcgaaaacctataagggcagcgggtttaatgaactgaagtttgacgatgcgacagggaaagaacaggtctacaaccacgcgcagaagaacatgaacaccgaggtgctgaataaccgcaccactgatgtgataaacaaccatgctgaaaccattggcaacaatcagatgattgcggttaccaacaatcagatacagacggtgggtgttaaccagatagagacggtgggcagtaaccagataattaaagtgggttctgttcaggtggaaacgattggacttgttcgtgcgctgaccgtgggcgtggcgtatcagacgacggtaggtggcattatgaacacctcggtggcactgatgcagtcctcgcagatgggtttgcataaatcgttgagggtcgggctgggttatgacgtcaaagtcggaaataacgttaccttcaccgttggtaaaacgaaaaaggatgataccgggcagaccgcgatttactccgccggtgagcatctggagctctgctgtggtaaggcaaggctggtgctgacgaaggacggacaaatttttctcaacggcacaaaaattcatttgcagggtaaggagcaggttaatggtgactcactgttgattaactggaactgtgcagcctcgaaatccccaccgaagacccctgatgaaaagcaggatacgccggatatgagagagtactgatcccgtacctgttcggaattcagtaacaaaccagcattaaaaataaacagaagaaggaatttgaatcatgagcggaaaaccagcggcgcgtcagggagatatgactcagtatggcggtcccattgtccagggttcggcaggtgtaagaattggcgcgccaactggcgtggcgtgctcggtgtgtccgggcgggatgacttcgggcaacccggtaaatccgctgctgggggcgaaggtgctgcccggcgagacggaccttgcgctgcccggcccgctgccgttcattctctcccgcacctacagcagctaccggacgaagacgcctgcaccggtgggcgttttcggccccggctggaaagcgccttctgatatccgcttacagctacgtgatgacggactgatactcaacgacaacggcgggcggagcattcactttgagccgctgctgccgggggaggcggtgtacagccgcagcgagtcaatgtggctggtgcgcggtggtaaggcagcgcagccggacggccacacgctggcgcggctgtggggggcgctgccgccggatatccggttaagcccgcatctttacctggcgaccaacagcgcacaggggccgtggtggatactggggtggtcagagcgggtgccgggtgctgaggacgtactgccagcgccgctgccgccgtaccgggtgcttaccgggctggcagaccgtttcgggcggacgctgacgtaccggcgtgaggccgcaggcgacctggccggggaaatcaccggcgtgacggacggtgccgggcgtgagttccgtctggtactgaccacacaggcacagcgggcggaagaggcccgcacctcttcgctatcttcttctgacagttcccgccctctctcagcctcaccgttccccgacacactgcccggtaccgaatacggccccgacaggggcatccgtctttcggcggtgtggctgatgcacgacccggcatacccggaaagcctgcccggtgcgccactggcgcggtacacgtatacggaagccggtgaactgctggcggtatatgaccgcagcaatacgcaggtgcgcgctttcacgtatgacgcgcagcacccgggccggatggtggcgcaccgttacgcgggaaggccggagatgcgctaccgctacgacgataccgggcgggtggtggagcagctgaacccggcaggcctgagttaccgctaccagtatgagcaggaccgcatcaccgtcacggacagcctgaaccggcgtgaggtgctgcatacagaaggcggggccgggctgaagcgggtggtgaaaaaagaactggcggacggcagcgtcacgcacagcgggtatgacgcggcaggaaggctcacggcgcagacggacgcggcgggacggcggacagagtacggtctgaatgtggtgtccggcgatatcacggacatcaccacaccggacgggcgggagacgaaattttactataacgacgggaaccagctgacggcggtggtgtccccggacgggctggagagccgccgggaatatgatgaaccgggcaggctggtatcggagacatcgcgcagcggggagacagtacgctaccgctacgatgacgcgcacagtgagttaccggcgacgacaacggatgcgacgggcagcacccggcagatgacgtggagccgctacgggcagttgctggcgttcactgactgctcgggctaccagacccgctatgaatacgaccgcttcggccagatgacggcggttcaccgcgaggaaggtatcagcctttaccgccactatgacaaccgtggccggttaacctcggtgaaagacgcacagggccgtgaaacgcagtatgagtacaacgccgcaggcgacctgactgccgttatcaccccggacggcaaccggagcgagacacagtacgatgcgtggggaaaggcggtcagcaccacgcagggcgggctgacgcgcagtatggagtacgatgctgccggacgtgtcatcagtctgactaacgagaacggcagccacagcgacttcagctacgatgcgctggaccggttggtacagcagggcggctttgacgggcggacgcaacgttatcattatgacctgaccggaaaactcacgcagagtgaagatgaggggcttatcaccctctggcactacgacgcgtcggaccgcatcacgcaccggacggtgaacggcgacccggcagagcagtggcagtatgatgagcacgggtggtttaaccaccctcagccataccagtgaaggccaccgtgtcgctgtccactacggctacgacgataagggccgcctgacgggcgaacggcagacggtggagaacccggagacgggggaactgctgtggcagcatgagacgaaacacgcctacaacgaacaggggctggcaaaccgcgtcacgccggacagcctgccgccggtggagtggctgacctacggcagcggttacctggcgggcatgaagctgggcgggacgccgctggtcgagtatacgcgggacaggctgcaccgtgagacggtgcgcagcttcggcagcagggcaggcagtaatgccgcatatgaactgaccagcacatacacccccgcaggccagttacagagccagcacctgaacagcctggtgtatgaccgtgactacgggtggaatgacaacggcgacctggtgcgcatcagcggtccgcgacagacgcgggaatacggctacagcgccacgggcaggctggagagcgtgcgcaccctcgcaccggacctggacatccgcatcccgtatgccaccgacccggcgggaaaccgcctgccggacccggagctacacccggacagcacgctcacggcgtggccggataaccgcatcgcagaggatgcgcactatgtctaccgctacgatgaatacggcaggctggcggagaagacggaccgcatcccggaaggggtgatacggatgcacgacgagcggacccaccactaccactacgacagccagcaccgtctggtgttctacacgcggatacagcacggtgagccgcaggtggagagccgctacctctatgacccgctgggccgccggacgggaaaacgggtgtggcggcgggagcgtgacctgacggggtggatgtcgctgtcgcgtaaaccggaggagacctggtacgggtgggacggtgacaggctgaccactgtacagacccaacagacaagaatccagacggtataccagccgggaagcttcacgccgctcctgagaatcgaaacagagaatggtgaacaggcgaaggcgcggcaccgtagcctggcggaggtgttgcaggaggacacgggtgtgacgctaccggcggagctggcggtgatgctggggaggctggagcgggaactgcggcagggcagcgtgagtgaagaaagccagcagtggcttgcgcagtgcgggctgacggcggaacagatggccgcgcaactggaggcggaatacatcccggagaggaaacttcatctttaccactgtgaccaccgtgggctgccgctggcgcttatcagcccggaaggggaaacggcgtggcagggggagtatgacgagtggggaaacctgctgggcgaggaaagcgcgcagcaccttcagcagtcactccgtctgccgggacagcagtatgatgaggagtcggggctgtactacaaccgcaaccggtactatgatccgttgcaggggagatatatcacccaggacccgatagggctgagaggtgaatggaatctgtataaatatccattaaaccctgttcggtttatagattctttgggtttaaaattccatgttaacggtgatccaagtgattttaatcaggctgttgagtatttaaaacaagattcacaaatgaaagaaactatagattttttatcaagctctgaagaaactataaatatagagtatattgaaggaatcaatgttagatttaattcgaataatatggcgatatattggaatagtagagcatctttattttgttcaactgaattaaactcgaaatcacaatcgcctgcattaggtttgggacatgagtttgctcatgcgcagtattaccttcttgataaggaaaatttcatggctcttttaagccgaacagataagaaatatgagaataaagaagaggcaagggttattacaataattgaatcgcgtgcggcgaaaactttaggtgagtgtaccagaggagctcatagtggactgcctttttatcgggtggatggaccgttgcagacgatgaaaataacgggtacgccagaatagtgaggttttttatgatgaaatatttgatggttttattgtctctattttctggttcggtactggggatggggcgagtgaatgaattgtgtggaatagatagcgtgaaaacgatagagataattaatcttccatcgtatgttaccacgttagttccgcttagcaaggaaggtcttaatgaaatatacagatataaagtggtggtgaatgaaattagcgatctttatgctggtaagataattgatttattgcaaatgaagtatttcagaaaagaaaaatataacaatataagatggggggttagtatcatttcgaaaggtaataataaatgtgaaatttattttgatgcttttggtgaatgtggaagtgtgaatggcattaacgtgtgttttgaaaaaaatgaaatgataggttggattaaaaaagaaatccctttgctgtcgcaaaaaataggtgggctttaaatggtagggcaatattcaaagacagtataggtaactatttgtatggccatgtaaggtaaaagaaaaggaataaaccatgagcggaaaaccggcggcgcggcagggcgacatgacccgcagggaaagatcatcagaagttcactttttgtactaaataattcgcattttatgtttaaaaattgagatattcctcattacctgaagctgttttttattgcttatacatgatcaaatactccttacataaataaggtgaacaaatggaacttaaaaaattgatggaatatatttctattattcccgattacagataagcctggaaagtagagcataaattgtcaggcatcctactattgactatttttgccgttatttctggtgcagaaagttgggaagatatagaggatttcggggaaacacatctcgatttcttgaagcaatatggtgattttgaaaatggtattcctgttcacgatactattgccagagttgtatcctgtatcagccctacaaaatttcatgagtgctttattaactggatgcgtgattgtcattcttcagatgataaagacgtcattgcaattgatggaaaaacgctccggcattcttatgataagagtcgccgcaggggagcgattcatgtcattagtgcgttctcaacaatgcacagtctggtcatcggacagatcaagacggatgataaatctaatgagattacagctatcccagaacttcttaacatgctggatattaaaggaaaaatcatcacaactgatgcgatgggttgccagaaagatatagcagagaagatacaaaaacagggaggtgattatttattcgcggtgaaaggaaaccaggggtggctaaataaagcctttgaggaaaaatttccgctgaaagaattaaataatccagagcatgacagttacgcaatttgtgaaaagagtcacggcagagaagaaatccgtattcatattgtttgcgatgtccctgatgaacttattgatttcacgtttgaatggaaaggactgaaaattcacaatgtgtgttaattttactgacatctttcaaaaggagcacaatcatgccgcacatcgacattaaatgctttccgcgtgaactggacgaacaacaaaaagcagcacttgctgcagatattaccgacgttattattcgccatctgaacagtaaagatagctcgataagcattgctctacagcagattcaaccagaatcttggcaagctatctgggatgccgaaatcgcgccccaaatggaggctttgataaagaaacccggttacagcatgtaatgcttaacccgccgtaactcgcttgccgctggtaacaaacgtgccagcacctaaatgatgcaacgtattgagcttatcatcatcaaactgccagcggccttcgacaaatacccgtgcgtctgccgctgctgataccacctcgccaaacagcgtgtcgtatttttgttgcgcagaagtcgcaggtagcaggcggcactccatccacgccaggcatttctcttcaacaagtggcaaaccaagcaccggacctttcaccaccggaatgccatagcaattaaatttatcttcttcacgacccgacacgcttcccactgcccacgtccagttagttgctgcaacgcccgggataacgatgccaaacttaccgttacgttcaatcaactccctggtccatgtcgatttatctaccacaatcgccacgcgtggcggttcaaactccaccggcattgaccaggctgcagccataatgttacgccgctgggattgctcatcgaaactggtgatcatgacagttgggccatgatttaatagacggctggcatggtgtaattctatggggatgaatcggctcatggtatcgcctcgtgaagaaggtttttttaagcgtagtccgtaacgcaataagtaacgaaattaacgggattggcgatttgcaaacgtgatgcatgtccgcgatcgcacaaaatagccggtgcggcgtctattccaggttataagttgagaaaaccactaagggaaacgcctgatgacgcccattctgaatcactattttgcccgtattaactggtcgggagctgctgcggtcaatattgatacgcttcgtgcattgcacctgaaacacaattgcaccattccgtttgaaaaccttgacgttttgctgccgagggaaatacagcttgatgatcaatcgctggaagagaaactggtgatagcccgtcgtggcggttactgttttgagcagaatggcgtgtttgagcgggtgttacgcgagctggggtttaacgttcgcagcttgttagggcgcgtagtgttatcaaatccgccagcattaccgccgcgcacccatcgtttgctgttggtggaactggaagaggaaaaatggattgctgatgtcggtttcggtgggcagacgctaaccgcgccgattcgtttagtttccgatctcgtgcagaccacgccacacggagagtatcggttgttgcaggagggtgatgattgggtgttgcagtttaatcatcatcagcattggcagtcgatgtaccgttttgatctctgcgagcagcaacaaagcgattatgtgatgggcaatttctggtcggcgcactggccgcagtcgcattttcgccatcatttgctgatgtgccgccatttgccggacggtggcaagctaacgctgaccaattttcattttacccattatgaaaatgggcacgcggtggagcagcgaaatctaccggatgtggtgtcgttatatgccgtgatgcaggaacagtttggtctgggcgtggatgatgcgaaacatggctttactgtggatgagttagcgctggtgatggcggcgtttgatacgcatccggaggcgggaaaataatttatgtcaggttgccggatgcggcgtaatcgccttatccggcatacattagcccggttgtagacctgacaggcgaagcgcatcaggcaacgatttcagatttcaattgcccattcggcatgaaacaaaatcaccgctgtgcctgaaatggtgactttttccggttggttatcacgaattgtcaccgtcacttcaatcacgccgtcacgccccaatgcgcgcccctgatggcctttaacacgcagcaccttgccatcgtggggcaatacgttgtgatgtaccaaccatgcacccatcgggccattggcattgccagtcaccggatcttccacaataccaatcgcaggcgagaacatgcgaccatcggtttcgtttttgcctgggcggatctggaacgggaagaaaccattgcagccaatctgtttgctgatagcgctcagcgcagcaagatcaggcgaaagggcgtcgatatccacttctggtttcaacgggatcatcacttttgagtgtcctgttgttgccacctgaattggcaagcctggcagaatatcgtcctcagtgagatgaagcgcgttgataatcgcctcacgtgtttcaccctccagcggcggttcaaagcccggcgtaccttgttccagcgaaatacgataatcatcgttgtgcttttcgatagtcacgcgatgttttcctgccagcgatgtttgccagatcgtgcaatttcctaaacctaacaccttcgcacgtacatagtgcgcagctactgtcgcgtgaccgcaaatcggcacttcaaccgttggcgtaaagtagcggatgcgcacatcgctgtcgtcgctgtgcagcagaaaagcagtttccgaatggcctaactcgcgggcgataagctgcatttgcgcttcgctaagattatcggcggggaaaacaacaccggcagaattgccgcgaaatggttgagaggtaaaagcatcgacgtggtacacctgcggtttcattaacgttctcctgtgactggagaactatcatagcctgcaagtggccggagagcgaagggctatccggccagggtgaaattatcgccgcgaacgcacaatctgataccgacgagtaaagtactcaaacggcgcgctccacacatgcaccaatctggtgaacgggaagagcaggaagatggtcattcccaataccagatgcaggcggaaaacgaacgctacgccgttaagcatttctgacgatccaccacggaaagtgacaatgctttgcgcccaacccaccagcttcatcatttcgctaccatcaggatactgtgctgaaaacggtatggtacttagccccagcagacactggatcagcaaaatgctcatgatgataatatccggcgtagtggaagttgcacgcacgcgctgatttgtcagcctgcgccacagcagtcctgcgccgccaatcaatgtcaacacactgcaaataccgccgagcaccatcgccatgagttgtttcgctgccactggcaaaaaccacgcgtacatccagtgcggcgttaacatgccgaacaagtgcccgaagaaaatccccaaaatgccgatatggaacagattcgaccatatcaccatcccgcgtttatcgagcatttgacttgaggaggcgcgccaggtgtactgcccgtagtcgtagcgcagccagctgccgaggaaaaacaccgtcgcacaaatgtacgggtagatatcgtaaaaaaagacgttcagatactgaatcatttcccacctcccgcactgatgtcgacatattgcggcgcgacatcctggctaaagcgtcgctgatattgattaagcggcgagctgtcacacgccgtggcgttatcttcaataaacttcacctgttcctcttcccacactgcatcaagcgcctggcgggtgtcatcgcgctcttcgctgtttacttgttttgtgacactgtcacttgaaagggagcttcccgccagttgcagcagagcatcaaacaacgcgtaccacggtgcctcgcgttgttttaagcgaccgccaagcagggcgaggatcggcgcaacattgagcaatccttctttcgcctgatcgtcaggcagtacgcttaaatactccagatacagcggtagataatcgggcagttcccgacaatccagctgcaggccgaccttttcatactccgccagcaggtccaccattgcctggccgcgatcgcgggactcggcatgaacatgttcgaacagcagcagcgatgtggtacgtccacggtcaaacacttcgcaccattcggcctgtttatccagcagcggcgcgttaagcaggttgtgggtgaaatccgtaagcatcggcgcgtcgctgcggatcaacgccagcgcgtcctccttgcattcccacaacagctcgtccggatactccatcaacaggccgatcactttgaggatctgcattattcgccctccgctttgtcgcgcacttcggtgatgttgatggcatcgatacggctactgttgaacaggttgaatttactgtccgaaccgtggcaaccgtcgtcaaaggtaaaaccgcagccgttgcgttctgcgaaggcatcgcccgccatttcccgatggctcgtcgggatgacaaaacgatcttcatagttggcaatggcgaggtaacgatacatctcttcgacctgggcgacgctcaggcctacttcgtcgatggcacgagtatcagtaacgccttccacggtttgtgaacgcatatagtggcgcatcgccatcatccgtttcagcgcccgcagtaccggaccggtatcgccggcactcaacatattggcgagatattgcaccggaatacgcaggctttcgatggcgggcagcacgccttcgcttttcggcaaaccgcccgcatctgcgtaggactgaatcggcgacagcggaggaacgtaccagaccattggcagggtgcgatattcagggtgcagcggtagcgccagtttccagtccatcgccattttgtagacaggcgaacgctgggcagcttcaatcacgttttgtggaataccttgtttcagggcttcctcgatcactgagggatcgtgtggatcgaggaatacttcgcactgacgttcatagaggtcaacttcgcgctcggtgctcgccgcttcctcaatgcggtcggcgtcgtaaagcagcacgcccagataccggatgcgacccacgcaggtttctgagcacacggtgggttggcctgactcaattcgcggataacagaagatacatttttctgacttgccgcttttccagttgaagtagatttttttgtacggacaaccgctaatgcacaaacgccagccacggcatttatcctgatcaatcagcacaatgccgtcttcttcgcgtttgtagatagcgccgcttgggcaggtcgccacgcaactgggattgaggcagtgttcgcacaggcgcggcaggtacatcatgaaggtgttttcaaactgcccgtacatctccttttgcatggcctcgaagttgcggtcgcgggcacgtttttcaaactcgccgcccagcagttcttcccagtttgggccccagatcactttgtccatccgtttgccgtcaatcagtgaacgcgggcgagcagtagggatatgtttgccttccggtgcgctatgcaaatgttcgtagtcgaaggtgaaaggttcgtagtaatcatcaatctgcggcaccaccgggttggcgaagattttggttattacgcccatcttgctgcccagacgcggacggatcttgccattcacatcgcggacccagccgccttgccactcttcctgatcttcccagtttttcggataaccaatgcccggtttggtttcgacgttgttaaaccatgcgtactccatgccttcgcgcccggtccagacgtttttacaggtcaccgaacaggtatggcagccgatacatttgtcgaggttaagcaccatgccgacttgtgaacggattttcattttttcgcctcctgtacctgatcgcgaccttcatcatccagccagttaacgttcttcatcttgcggatcatgatgaactcatcgcggttcgatccgacggtgccgtagtagttaaagccccaggccagctgcgcgtaaccgccaatcatatgcgttggtttcgggcaaacgcgggtgaccgagttatgaatgccgccgcgcatgccagttacttccgaaccaggaatattcataatgcgttcctgggcgtgatacatcatggtcatgcccggcggtacacgttggctgaccaccgcgcgggcagtcagcgcgccgttggcgttgaatacttccacccagtcgttatcgacaatggtcagttctcgggcatctgtttcgctgatccagacaatcggtccaccgcgagagagcgtcagcattagcaggttttcactgtaggttgagtgaatgccccatttctggtgcggcgtcaggaagttaagtgctttttccgggaagccgtttggcggtatctggcgcatctcactgacgctacgggtgtcgataggcgggcgataagccaccaggctttcaccaaaagcacgcatccacggatgatcctgatagagctgctggcgtcccgacagcgtgcgccacggaattaactcatgaacgttggtgtatcccgcgttataggatacgtgatcgctttccagaccggaccaggtggggctggagataattttacgcggctgcgcctgaatatcgcgaaagcgaatcttctcgtcctctttgtgcagcgccagatgggtatgttcgcgcccggtgatctcgcccagcgcctgccacgctttgactgcaacatgaccgttggtttccggtgccagtgccagaatcacttctgaagcgtcaatggcggtgtcaatcagcggacgcccctgtgccgggccatcacgcttggtgtaattgagtttgccgaggaaatcgatttcatcctgcgtattccacgaaatccctttaccgccattgccaagtttgtccatcaatggcccgagcgaggtaaagcgttcatacgtagcagggtagtcgcgctccaccgccacaatattcggcgcggttttgcctggaatcagatcgcattcgcctttgcgccagtcgagcacttcacacggctgtgagagctctgccggagagtcatgcagtaggggttgtaataccacgtcggtttctttgccaagatgacccacgcacacttgcgaaaatgctttggcgatacctttgtagatttcccagtcgctgcgtgattcccacgccggatcgaccgccgcagaaagcggatgaataaacggatgcatatccgaggtgttcatatcgtctttttcgtaccaggtggcggtgggcagaacgatatcggagaacaggcaggtactggacatgcggaagtcgagcgtcaccagcaggtcgagcttgccttcaatcgccgcagtttgccactcgacttcttccggtttgatcccgtcgctggcaccgagttcctcgccctgaatcccgctttcggtccccagcagatacttctgcatatactcgtggcctttgccggaggagccaagcaggttagagcgccagacaaacaaattacgcggatgattgctgccgctatctggttgttcgcaggccatacgtaaatcgcccgatttcagcgcctgggcggtaaattctgtgggggataatccggccttgtcggcttcagctttaatcccgagcgggttacgccccagctgcggcgcagaaggtagccagcccatacgttcggcgcgaacgttgaaatcaatcagatgaccgctgtacttactggcatcggcgagcggtgaaagtaactcctgagcagagactttttcatagcgccattggctggaatgattgtagaaaaacgaggtgctgttcatttggcgcggtggtcggttccagtcgagcgcaaaggccagtggcaaccagccggtttgtgggcgcagtttttcctggccgacatagtgtgcccagccgccaccgctttgcccgacacaaccgcagaagatcagcatattgatcatcccgcggtagttcatgtccatgtgataccagtggttaacacctgcgccgaggataatcatcgagcgcccatgcgttttatgggcggtatcggcaaattcacgggcgatggtttcaatatactggcgcggcacgccggtaatttgctcaccccaggctggggtgtacggtttgatttcagcgtaatctttcgcactgttttcatcttccagcccgcgatcgaggccgtaattcgccagtaccaaatcataaacgctgaccaccggacaggtgttgccatcgactaacgtcaggtttttaacgggcaattggcgcaccagcaccggattgtgttttacgctgcgaaaatgcggattttcaatgccgccaaagtaggggaaggccacgcctgcaacagcgtcatgttgaccgagcagggttaacgacaattcggtttccgtaccggcggcaatggattccagattccatttgcctttttctccccagcggaaaccaatcgaaccgttcggcactaccaattcacctgcggtattaactgctacggttttccactgcggattgttgctttcgcccagtccatccaccaggtcagatgcgcggatcatgcgcccgggaacgtagctaccatcgtcgcgaggctccagcattaccagcatcggcatgtcgctgtagcggcggcagtagttgataaagtagtcgctgggattatcgagatgaaactcttttaaaatcacatggcccattgccatcgccagggcgctgtcagtgccttgtttcggtgccagccactggtcgcacaatttggccacttcagagtagtcaggggtaatggcgatggttttagtgcctttgtagcgtacttcggtaaagaagtgggcgtccggcgtacgtgtctgcggtacgttagacccccaggcgatgatgtagctggagttataccagtcggcagattccggtacgtcggtttgctcgccccaggtcatcggcgaggcgggcggcaggtcgcaataccagtcgtagaaacttaaacaggtgccgccaagcagtgacagataacgcgttccggcggcgtaagaaaccatcgacatcgccgggatcggcgagaaaccggcaacgcgatccgggccgtaggttttgatggtccagacgttagcggcggcaatcagctggtttagttcctgccagttggagcggataaacccgccgcgcccacgcacttgtttgtagctcaggcacttttgcggatcgttcataatcgatgcccacgccagtaccggatcgctgtgttgtttgagggcttcgcgccacagttcaatcagtcgtttacgaatgagcgggtatttcaggcggttagcgctgtaaagataccaggagtaacttgcgccacgcgggcagccgcgaggttcatgattgggcaggtcagggcgagtgcgcgggtagtcggtctgttggatttcccaggtcaccagaccatttttaacgtagattttccagctacaggagcctgtacagttaacaccgtgggtggaacgcacgattttgtcgaactgccaacgctggcgatagctgtcctcccagtcgcggttgctatgcatcacctgtccgtgaccatcggcaaaggtttcgcccttttgtttgaagtagcgaaagcgatccaaaagtttactcatgacatgactcctgctccaggaatgaattgggatctgatgccttgtcggatgcgacacggttgtacatcaggcatcgatctcttatttttggctgaacttccgccgaccataaaccagccaggtcagcagcacacaaacgatgtagaagattaaaaacactttcatcgcgccgaccggagagccggtcatattgagcgacatgccaaacgcctgcggaataaaaaagccgcccactgcgccaatggctgagataaagcccagagccgccgccgtttcggtgacggcttctttctgagcttgctcatcactaccgcctttcatctttacccgataaatggttatctggcgaaagatgacggcgatcatctggaaagtagaaccacttcccagacccgcagtcagaaacagccccataaatacggcgtaaaaggcgatgaaattaccggagcctgtgcccggtaaggtaaggaacagcagggcactgaaaatcgccataaaaataaagttgatcaacgtcacccgcacgccgccgaacttatcggaaatagcaccaccaaccgaccgcgcgatggcaccgataaatgggccaaagaacgccaggcgcagaatattcacatccgggaactgggtttttgccagcatggcaaaacccgcagaaaaaccgataaacgaaccgaaggtggcaaggtaaagcaggctcagcagccagagatgcaggcgttgtaagacagggagctggtcggcaattgaggcgcgtgaactggcgatatcattcatccctgaccaggcggcgatcgtggcaatcgccagtagcggtacccaaatccatgcggcattcgccagcgacatcaccgaaccgtcggcctgcggtacgccattgacgccgagaaaggcaaatacaggtacaaaaatgaccagcggtgcaaccagctgcattacacttacacctaagtttcctaatccgccattaatcccaagagcgctcccttgtttggcttttggaaagaagaaacttatattgcccatgctcgaagcaaagtttgcacctgcaaaaccgcatagcaaagcgataacgataaatatcccaaaaggagtattcggattttgcacggcaattccgagccagacgcaaggaataatcaggattgcagtactaaaaaccgtccatcggcgtccaccgaatataggcaccataaaggagtagggaacacgcaataatgcgccagaaacggagggtaatgcggttaataaaaagagttgatcggtagtaaaattaaaaccgattttattgagattaacggtaactgcgctaaatagcatccagacacagaaggcaagaagtagacaactgactgatatccagaggtttcttcgagcaatatgttttcctttattttcccagaaggccggattttctggtttccagtcgcgtaaaagataacgactatttttctcattttgcagtgccatattgttcctcacatgcacacattggtaatgaaaaaagacaaaacaggaggtaaggcgcaatagccagttattagaattaaggatgaattgggtgaagtgctgattgaaagaatagataagaaagcgtaaccgcgggggcagaatggggattaagtagccagatatgtgttactaaatgtaactaacaagctaaccttcaaacgggggttaatctttgaacgtatgtcatgtttcaacccttcagatcgtgaatctaaagggttacatattaactatattatcaacaagaccagacacttatagaattagtgatgatttattcactaaaaaggccatgaactggaggaaaacgatctgtccagaaggtctatcggttcctctcttattgcctgattgtaataatcgttattacagtaagtattgtttatttcatctaaggtcatgtttttaacttttatattcctctggtttacaacttcctctgtcttgtaagtgtgtatattatatggggtatatgcttttttaataggatagtgaaacaattcgttatccacatctattccgtcagagtgaacttcaaatgcaccaggcgaaagaattgccaggccagtattaagcttaagtgctggggaaaacaaattaaataacatgagctgcatagtagggcaattgttcttcccagaaacatttaaaaaatttaagtttttgctctgttttattatggggaataaagttccaatatcggatgtattattagtatcaatgtgggttattttattattgtccagtcttaaacttttgatagatggaagataagtcaggaaatcaagatttatatatttcaactggttgttagcagcgtttaatgtctgaacattgcagaagttgctatagaatattttaatttcagaaagcaaattgttgttaataagtaacgtattcaagttgggaaataagtcattgtgtaaacttgttagtttattatgggatagatccagcagtaagagttcatttttattacctgcaacaatatcagttaattgattatggctgagattcaggtattgcagccattcgcaagattctaattgcacaaactctagttgattatgtgccgcactaaaataagtaactgatgaaagcctatctatatcaatatttctgagagcattattattcatagatatatgtgtaatacttacatttctgccttgaggaaaatttattgagtcaagagtattactattcagacttagctttacgagtctatcgtagttggttgcatcaaaatgtgtgagttggttattatcaagattgatagaggtgaagttttgcagccctggtggttgagtggttaaattaagtcctgataaatcaatggtcacttcattagtgtcatcaattatatttcttactgcagtccagtactgcatttgtgcaagtggatcattgttgatgccgttaactaatacatgccaaagatgttttgatgatattagttgatcaatgtcattggttggcagtaaattgttattgcttaagtttaaatattccagttttgtagtgtttttggcgtttaaatgtgcaatatggttgtcgtttaaagtgattgttttcatcctgggatgattgtgtaatataaggtcagtgatcatattgtgatgggcacttaactcaatcagagattcttgccgcgcgagccgttggcttcatcgttatagcctttaaaatcatattcccagtgaccaaaaccaatcatttgatcattgatttgcgtttctcctttaaagccgagacgggcataagttttatcaccatcgtcacgcttatcatcagtaaaataacgtagagcggtaaccttgccataaaggtcgagtttattaccatccttgttatagacttcggcagcgtgtgctacgttcgcagctaacaaaccagttacaaccaccgcaactatttttaatttcatttaacagaatccttttaattatcgttaaacgtattttctaaacgaattttaaacggcgtcatttataaatgacatactgtttttaaaatagaatggtgattaaaaacaatgagaaaaatagatgaaataatattatttatcgatatgtgatcgaagtcgaaatgagatataaggtgaattactggtatttgaaatttattttttaatattgtcggaatttatctgattaactgccgggccgtagacccggcaattattttaaccacgacgtgtcgccagccagcagagcagggaaccgccgcagaccattagcgcgccttgccagaacgagaacgacagtggggcgctgagcagcacggctgcaagcgctgaggaaagtacaggtgtaaaatacgagcctaccgccattatggtgacattgccatgcaatataccgacattccatgcagcataagcaaatcctaaggtaaatgccgcagagatgagtttaatcatgacgggcgtgctaaataccatttctggttgtggcgtgagaaaatagtaaacccacagacttgctcccgttagcaggacaaaaacggtaattccgttaaatccgcgtgcgtatttattcgttactgtgcaataggctgcccagataaacgcaccaataaacgccaggaaataactcaatgggctggtggtaatattattgatgatttcatcataatgtaacccattatcaccgcctaacacccagcagacgccgaccagggctaataataatcctggtacaatcagccagttggttttctgaccattaaacagaatggcaaagagaattgtcaggctgggccatagatagttcaccatacccacttcaatcgcctgatgacgggtcgccgcataccctaaggaaagcgccagacagatttcatagctgacgaataacagactcccggcgagtaaatagcctttcggaatctgccgaatacgcggaaatccaaccgtgaagattaacagcagcccgcttaatgaatagatagcagctgcgccgccgaccgggccgagcccctcgctgacaccgcgaatcaatcctaccatcgtgctccacaggacgatcgctattagccctatgagcgttgctttttgtcgtgtcatgctcgctgttttgtctctcttgccgttaaaaattaagctgaattttatagcatttttttaactggcctgtcaggcagtggtgcgtttttctaccgctattgaggtaggtcaatttgcgcaggcggattattttgtggcaaacacgtgttctttttgatttcgcgcaaaaagattcagaattttactgttagtttcctcgcgcagtaatacccctgaaaaaagaggaaagcaatggacgtcagtcgcagacaattttttaaaatctgcgcgggcggtatggctggaacaacggtagcggcattgggctttgccccgaagcaagcactggctcaggcgcgaaactacaaattattacgcgctaaagagatccgtaacacctgcacatactgttccgtaggttgcgggctattgatgtatagcctgggtgatggcgcgaaaaacgccagagaagcgatttatcacattgaaggtgacccggatcatccggtaagccgtggtgcgctgtgcccaaaaggggccggtttgctggattacgtcaacagcgaaaaccgtctgcgctacccggaatatcgtgcgccaggttctgacaaatggcagcgcattagctgggaagaagcattctcccgtattgcaaagctgatgaaagctgaccgtgacgctaactttattgaaaagaacgagcagggcgtaacggtaaaccgttggctttctaccggtatgctgtgtgcctccggtgccagcaacgaaaccgggatgctgacacagaaatttgcccgctccctcgggatgctggcggtagacaaccaggcgcgcgtctgacacggaccaacggtagcaagtcttgctccaacatttggtcgcggtgcgatgaccaaccactgggtggatatcaaaaacgctaacgtcgtaatggtaatgggcggtaacgctgctgaagcgcatcccgtcggtttccgctgggcgatggaagcgaaaaacaacaacgatgcaaccttgatcgttgtcgatcctcgttttacgcgtaccgcttctgtggcggatatttacgcacctattcgttccggtacggacattacgttcctgtctggcgttttgcgctacctgatcgaaaacgacaaaatcaacgccgaatacgttaagcattacaccaacgccagcctgctggtgcgtgatgattttgctttcgaagacggtctgttcagcggctacgacgctgaaaaacggcaatacgataaatcgtcctggaactatcagttcgatgaaaacggctatgcgaaacgcgatgaaacactgactcatccgcgctgtgtgtggaacctgctgaaagcgcacgtttcccgctacacgccggacgttgttgaaaacatctgtggtacgccaaaagccgacttcctgaaagtgtgtgaagtgctggcctccaccagcgcaccggatcgcacaaccaccttcctgtacgcgctgggctggacgcagcacactgtgggtgcgcagaacatccgtactatggcgatgatccagttgctgctcggtaacatgggtatggccggtggcggcgtgaacgcattgcgtggtcactccaacattcagggcttgactgacttaggcctgctctctaccagcctgccaggttatctgacgctgccgtcagaaaaacaggttgatttgcagtcgtatctggaagcgaacacgccgaaagcgacgctagctgatcaggtgaactactggagcaactatccgaagttcttcgttagcctgatgaaatctttctatggcgatgccgcgcagaaagagaacaactggggctatgactggctgccgaagtgggaccagacctacgacgtcatcaagtatttcaacatgatggatgaaggcaaagtcaccggttatttctgccagggctttaacccggttgcgtccttcccggacaaaaacaaagtggtgagctgcctgagcaagctgaagtacatggtggttatcgatccgctggtgactgaaacctctaccttctggcagaaccacggcgagtcgaacgatgtcgatccggcgtctattcagactgaagtattccgtctgccttcgacctgctttgctgaagaggatggttctatcgctaactccggtcgctggttgcagtggcactggaaaggtcaggacgcgccgggcgaagcgcgtaacgacggcgaaattctggcgggtatctaccatcatctgcgcgagttgtaccaggccgaaggtggtaaaggcgtagaaccgctgatgaagatgagctggaactacaagcagccgcacgaaccgcaatctgacgaagtggcaaaagagaacaacggctatgcgctggaagatctctatgacgcagatggcgtgctgattgcgaagaaaggtcagttgctgagtagctttgcgcatctgcgtgatgacggtacaaccgcatcttcttgctggatctacaccggtagctggacagagcagggcaaccagatggctaaccgcgataactccgacccgtccggtctggggaatacgctgggatgggcctgggcgtggccgctcaaccgtcgcgtgctgtacaaccgtgcttcggcggatatcaacggtaaaccgtgggatccgaaacggatgctgatccagtggaacggcagcaagtggacgggtaacgatattccggacttcggcaatgccgcaccgggtacgccaaccgggccgtttatcatgcagccggaagggatgggacgcctgtttgccatcaacaaaatggcggaaggtccgttcccggaacactacgagccaattgaaacgccgctgggcactaacccgctgcatccgaacgtggtgtctaacccggttgttcgtctgtatgaacaagacgcgctgcggatgggtaaaaaagagcagttcccgtatgtgggtacgacctatcgtctgaccgagcacttccacacctggaccaagcacgcattgctcaacgcaattgctcagccggaacagtttgtggaaatcagcgaaacgctggcggcggcgaaaggcattaataatggcgatcgtgtcactgtctcaagcaagcgtggctttatccgcgcggtggctgtggtaacgcgtcgtctgaaaccactgaatgtaaatggtcagcaggttgaaacggtgggtattccaatccactggggctttgagggtgtcgcgcgtaaaggttatatcgctaacactctgacgccgaatgtcggtgatgcaaactcgcaaacgccggaatataaagcgttcttagtcaacatcgagaaggcgtaagggggcgaacagatggctatggaaacgcaggacattatcaaaaggtccgcaactaactccatcacgccgccttctcaggtgcgtgattacaaagcagaagtcgcaaaacttatcgacgtttccacctgtatcggctgtaaagcctgtcaggtggcgtgttcggagtggaacgacatccgtgatgaagtggggcactgcgtcggggtttacgataaccccgccgatctgagcgccaagtcctggacggtgatgcgctttagcgaaaccgaacagaacggcaagctggagtggctgatccgtaaagacggctgtatgcactgtgaagatcccggctgcctgaaggcgtgcccgtctgctggtgcaatcattcagtacgctaacgggattgtcgatttccagtcggaaaactgcatcggctgtggttactgcattgccgggtgtccgtttaatattccgcgcctcaacaaagaggataaccgggtatataaatgcacgctctgcgtcgatcgcgtcagcgtcggccaggaaccggcttgtgtgaaaacctgtccgaccggggctatccacttcggcaccaagaaggagatgctggagctggcggaacagcgcgtggcgaaactgaaagcgcgtggttacgaacatgctggcgtctacaacccggaaggggtcggtggtacgcacgttatgtacgtgctgcatcacgccgatcagccggagctgtatcacggtctgccgaaagatccgaagatcgacacctcggtaagcctgtggaaaggcgcgttgaaaccgctggcagcggctggctttattgccacttttgccgggttgattttccactacatcggtattggcccgaataaggaagtggacgatgacgaggaggatcatcatgagtaagtcgaaaatgattgtgcgcaccaaatttattgatcgcgcctgtcactggaccgtggtgatttgcttcttcctggtggcgctgtccgggatttcgttcttcttcccgacgctgcaatggctgacgcaaaccttcggtacgccgcagatgggacgcattttgcacccgtttttcggcattgcgattttcgtcgcactgatgtttatgtttgtgcgttttgtgcatcacaacatcccggataagaaagatattccgtggctgttgaacattgtcgaagtattgaaaggcaatgagcataaagtggcggatgtcggtaagtacaacgccgggcaaaagatgatgttctggtcgatcatgagcatgattttcgtgctgctggtgaccggggtgattatctggcgtccgtactttgcgcagtacttcccgatgcaggttgttcgctacagcctgctgatccacgcggctgcgggtatcatcctgatccacgccatcctgatccatatgtatatggcattctgggtgaaagggtcgattaaagggatgatcgaagggaaggtgagccgtcgctgggcgaagaaacaccatccgcgctggtatcgtgaaatcgagaaggcagaagcgaaaaaagagagtgaagaagggatataatctcttttgaactttaagctgaaaatggcgctttaagaagcgccatttttttattgcgtaaccagacggcgtagtcgcgacacatccaccgttttttctgcctctgccagactccaggcgttttgcagattcagccacatttgcggcgaactgccgatcaccacggaaagtttaatcgccatttctggtgtcaaagctgcttttccggtcagcaatcggcttgccgttgagggagcaatttccattgctctggcaaactcgcgcaggctgacattaagttcgtccagtgattcctgaataatgtcccccgggcggggatgattggccattttcatcagtgtctttactctcagtagtgttccttcatcaggaacactatcattattgttgcgtaggaaggaacaataatccatttagccatttaatgtcggagagagtgcgatgctgcgacaccaggactggcactcgcagcaaaggcctcttaacggcggaaatcaatcaccatacggccacggattttgccttcttccatctcggtaaagatggtgttgatgtccgctaacggacgcagggcgactttcggcaccactttgccttcggcggcaaactggaaggcttcggttagatcctggcgcgtgccgaccagcgaaccgaccacttcaatgccatccagcacaaggcgtgggatatccaggctcatagactccggcggcagaccgacagccacaacacgaccgcctgcacggacagcatcaactgccgagttaaacgcagctttagcaactgctgttaccaccgcagcgtgagcgccaccggttttctcctgcacaattttggcggcgtcttcggtgcgtgagttaatcgctaaatctgcacccatttcggttgccagttttaactgctcatcattgacatcaatggcgatcactttcgcgttaaagacattcttcgcgtattgcagagcgaggttacccagaccgccaagaccgtagatagcaatccactgccctggacgaatttttgacagtttaacggctttgtaggtggtgacccccgcacaggtaatgctgctggccgccgccgagtccagaccatctggcacttttaccgcgtaatcggcgaccacgatgcactcttccgccatcccgccatcaacgctgtatccggcatttttaactgaacggcagagcgtttcgttaccactattacagtattcgcaatgaccgcatccttcgtagaaccacgccacgctggcacgatcgcctggttttaatgaggtgacaccagggccaacttctgccaccacaccgatgccttcatggcccagaattacgccagttttgtcaccaaaatcgccattcttaacatgaagatcggtatgacatacaccacaacactccattttcagcagggcttcgccatgtttcagtgagcgcagtgttttatccgtaacgtcaacgtgatgatccttcgtaacaactgcagccttcatagttcctccttttcggatgatgttctgcatagcaggtgaggcaaatgagatttattcgccactacccagtatggatgagatctgaaaaagggagagagaaatagcccggtagccttcactaccgggcgcaggcttagatggaggtacggcggtagtcgcggtattcggcttgccagaaattatcatcaatggcctgttgcagagcttcggcagacgttttcaccgccacgccttgctgctgcgccattttgccaaccgcaaacgcaattgcgcgggagactttctgaatatctttcagttccggtagtaccagaccttcgccgttcaggaccagcggcgaatactgagcaagcgtttcacttgccgacatcagcatctcatcggtgatacgtgacgcgccggaagcaataacccccaggccgatgcccgggaaaataaaggcgttgttacactgggcgatagggtagattttatctttccataccactggattaaacgggctgccagtggcgaccagcgcgttaccttcggtccaggcgataatgtcctgcggtgtggcttccacgcgtgacgtcgggttagacagcggcatcacgatcggacgcggacagtgtttatgcatctcacgaatgatctcttccgtaaacagcccggtctgtcctgagactgccaatcagaatatctggttttacattgcgcaccacatccagcagtgacaacacatcgctgtcggtatcccagtcactgaggttttcgcgcttctgcaccagtttggtctggaaaggcagcaggttcggcatcttgtcggtcagcaagccaaagcgatcgaccataaagactttctgccgcgccgcttcctcgcttaatccttcgcgctgggtctgggagatgatcatttcggcaatgccgcatcccgctgaacctgcgccaaggaagacgatttttttctcgcttaactgaccacctgccgcgcggctggctgcgatcagtgtgccgactgttaccgccgcagtgccctgaatgtcatcgttaaaagaacaaatttcattgcgatagcggttaagtaacggcatcgcatttttttgagcaaagtcttcaaactgcaacagcacgtccggccagcgttgtttcacagcctggataaattcatcaacgaattcatagtattcatcgtcagtgatacgtggattacgccagcccatatacagcggatcgttaagcagctgctggttgttggtcccaacatccagcaccaccggaagggtatacgccgggctgatgccgccacaggcggtatagagcgacagtttaccgattggaatgcccatcccaccgatgccctggtcaccaagccccagaatacgttcaccgtcagtcaccacaatcactttaatattatggttcggcacgttttgcagaatatcgtccatattgtgccggttctggtaagagataaacacgccgcgtgaacggcggtagatctcagaaaaacgctcacaggctgcgccgacggttggggtataaataacaggcatcatctcatcaagatgattgtttaccagacggtagaagagggtttcgttagtgtcctggatgttacgcaggtagatgtgtttgtcgatttcggttttgaatccctgatactggatccatgctcgttccgcttgttcttcgatggtttcgaccacttccggcagtaaccccagcaggttgaagttacggcgttcttccatgctgaaggcactgcctttattcaacaacggaaattccagcagtacagggccagcgtaagggatataaagcgaacgctgtttttttgtttttggttccatgtcactcactcttttttgaatatccatccctggcacgcttttatcgtctttgctttaccaccaggcgtcggccccaagtataaagcagataaaaacaaaaacaccattgcgcaggcaatggtgtttaatcgtcattgaggactgatggttatgaattacttttcagcggggcgttttctgccggttgggttatttaccacgctggatttgtcaccttcggtaactattttgcgctggttagaaattttatggtccagtccaagaatatgacgtgcctgacggttcgatttcattttaactcctcaatcctgttgctagttttaaggacaacatcgccgtagcgaagaaacacgtgctaaacccctaaattaggttgccgatcaagcatagcaccttaaagcgtagggtgctggccactgaccacataattgatcgtttgctggtagatatcactgaggatgtcgttatcagaagcttccacccatttggtcagctccatgagaatgtcatcttcagtgacaacaccgtgctctgcccgaaggccttgctcaatggcattaaccagagcgggttctgctgttgaattttctgcctgataataagtaaacatagtgattctccgtgtctgtgtatttatggtgtctgctacggatcgcagatttataaagcacattcagcatggcaaatatttgccgcttcgttgttaagattagtcctggttgatgatttttatattttaacctcatgatattgataggtattattattgtggtgagttgattaatattaatgcaatatctcttgggttatatattcccggttatctattgtggaaatttaatttaagtgcagaagtaatatttctgccggatttttattcggaatatcctgcttatcctcgtgctgtttctcacgtagtctataatttcctttttaagcccacaggagagcaacaatgacaatccataagaaaggtcaggcacactgggaaggcgatatcaaacgcgggaagggaacagtatccaccgagagtggtgtgctgaaccaacagccgtatggatttaacacgcgttttgaaggcgaaaaaggaactaaccctgaagaactgattggcgcagcgcatgccgcatgtttctcaatggcgctttcattaatgctgggggaagcgggatttacgccaacatcgattgataccaccgccgatgtgtcgctggataaagtggatgccggttttgcgattacgaaaatcgcactgaagagtgaagttgcggtgccgggtattgatgcctctacctttgacggcatcatccagaaagcaaaagcaggatgcccggtttctcaggtactgaaagcggaaattacgcttgattaccagttgaaatcgtaaagcattgccggatgacgcgtcaggcgcgtgaatgcctgatgcgttgttagcatctctacagcgcccgccagcaccggatctcacgtccgtcctcccttattgttaatgattgccggacttcacatccgtgggttgccagagggcaacgttcgtagaaaaaacagccttgcggcaacgtgcggtttcccggcagatccgttttacgtaatgcccattcttcctccagcggtttatcaatggcggggagggaatccagcaataatcgggtgtatggatgtgcaggtgccgtcaacacctgctgcgcgtcgcccagttctacaatctgcccgagatacatcaccgctacccgatcgctcatatgacgaatcaccgagacattgtgtgagatcagcacataggtcagcccgcgatttacctgtagcgttaccagtaaattgaggatctgcgcctgcacggagatatccagtgcagaggttggctcatcaagcacaatcacgtcaggctgcgaagagagtgctctggcaatggcgatgcgttgccgctgcccgccggagaacgcatgaggcaggcggtcgagatactccggacgaatacccacctgcacagccaactcctctgctaacgctcgccgctgttgttcactactacgcttagctatccagagcggttctgtgatgatgcgccacaccggtaagcgcggattgagcgaagagagcgggtcctgaaacaccatctgcataatgcgttgtgatcctgaacggatgtactgcccgtggctcggttgcagcatacccattaaaagctgtgcgagggtgcttttgccgcagcctgactcgccgacgatccctaaggtttcaccacggcggatctgtaaatcaataccattaatggcatgaacatgttccgtagttttaccaagccagtttttacgggccgggaaattgatatggacgtcgcgtaacgttaataacgtgtcagacacttatgacctcctgctgcggataccaacaggcgcagcgctggttgttgtcaccacacgctgtcagcgccgggacgttttcacactgtgcacctgccgcatagcaacgatcgcgaaaagcgcagccttcaggcaaatgggtgaggtttggtaccgtccctggaatggcgggtaatggctggcgtggtactccatgttctggtgcgcattgcagcaaaccaatggtatacggatgccggggatgatggataatgtctgccgtcacgccgctttcaattacgcttccggcatacatcacgtaaacgctatcgcacagttgcgacaccacgaccatatcatggctgatgaacagtaccgcagttccactggcgcgggctttatgtttaagcaaacgcagtacctgcaactgcaccgtgacgtccagcgccgtagtcggttcgtcggcaataatcaattgcggctcgcaggagaatgccagcgcaatcattacccgctggcgcataccacctgaaagctcaaacggatagcgcgacataacttccacggcatccgggatttgcatctcttccagcagggcaatcgctttagctctggcttcccgacgacttattggttgatgatggcggatcacgtccatcatctgaagacctattcgaagtgtcggattgagggcggtcatcggttcctgaaagatcatcgccactcgtgcgccgcgccattgacgaagctgtttttcccgagcgttaagaacatcgtctcccagtagtgaaatctgcccccgatgtacgcaataactgcccgtcggtagcagacgcataatcagcattgcggtgactgatttacctgagccggattctcccaccagaccgacaatttcaccgcggttaatctgcaaggacacattgttgagcgcgtgaacatcaccgttaaaaccggggaaactcaaatgcagctgttgaatgtccagaacgggttgggtcatgactgctttcctcctgctttcgggtcaagcagatcgcgaataccatcaccaaagagattaaacccaacggcggtaagcaaaatcgctgcccccggaaatgcgcaataccaccactgatcgagtacatagttgcgaccatttgctaccatcgcgccccattcagcactcggttgttgagcacccaggccaataaatcccaacgtggcggccattaaaatcgcgctaccgatatccagcgatgcctgcacgatcagcggcggcagggagttacgtaaaatatgccagctgatcagatgccaacgcgacgcaccaaaggttttcgccgcctgaacataggtatactggcgtacaactaatgcttgcccccgcgccaggcgcacataaaagggaattcgcacaatagcaatcgccagcatggcgttaaataaactcggcccgagagcggcagccagtgccattgtcagtaccaacgaaggaatcgacagcataatgtccatgatgcgcatgatgatggcgtctgcgcgtccgccaagcacaccggatagacatccgagtagcgaaccaatcatacccgcaatggcaaccacgactaatccggcgagaattgattgctgactgccgaccagtacgcggctgaacagatcgcgtcccacttcatcggtgccaaaccagtgcgccgcagaaggcggcaaaaggcgggcggttaaatcaatggcgttgggatcatgcgtcgcaagccacggtgaaaaaatcatcatcaatagcattaatacaatgatgactgcgccggtcacggtgagcggactgcctttcagcatccataccagttttgcaccgttaaatcgcgtttgtttttgtgggcgtacggcggacgtttcctcgcttagcatcattcaccacctccacgtccgatacgcggatcaatccacaaatagagcaaatccaccaccaggttgaccagcacataagcaaatgaaaccacgacggcaaagcccatcactgccgggaagtcgagcgcctgtattgatgttactacccatgcacccattccgggccaggcaaaaacggtttcggtgagcactgcgccatacaacaaatcgcccagcgccaaacccaatacggtaatcgatgggatcaacgcattgggtagcgcataacataaaacgatataccagccgggcaagccgctggcccgggcggtacgaatgtagtcttcactcaattgttccagcatcgctgagcggatctggcgagcgacaattcccaggtgaacgaacgccagcgttaatgccggtaagatgagatgttgcaacgcattgaagaagacttcaccgttgccttcaagcaacgcatcgagcagataaaagccggtaacgtgcgttggtggatccagccagtcatcaagccttccgccgccgggaagtatttgtagatgaccataaaacagcacaatgacgcccagcccaagccagaacgcaggtgtggagattccggtaatggccattattcgcaccagatgatccagccagcgatttcgccagactgcagagagtatgcccagcgggatgccaatcaagagtgccagcagcagggcacaaaaagccagctccagcgtcgccgggaaaaatatacgcaactcttccagcaccggacgcccggtacgaatggatgttcccaggtcaccatgaaacaggtcgctgacgtagcggtaaaactgtacatacagtggctggtccagtcccagttgctggcgaatattttccacgatagcatcgctggcgcggtcacccgccagtaaccgcgccggatcaccagggatcagatgcgagataataaacgtaatcacgcagacgcccgccaccacgagcaccagcccccagcagcgttggcgtaaaatactccagaaggtcacgttatttactcatggtattgatattgaagacctgttccagcatgggattgaacacaaagcctttcacctctttgttcatcgccagttggtagtttttctggaacaggtacacataagcagcgtcatcaatgacgattttctgtgcctgctggtagtcccgggtacgctgcgtctggtcggtggtcgcaagcgcattgcgcagtaacttatcgacctcactgttttcatagaacgagcggttacccggcagaccttttttgtctgactcaaaccagtaattcataaacatatacgggtcggcaaaatccggactccagttgccaatcgcaatgtcgtaatcacctttacccactctgtcgcgcatggtggcgttcgccagcttttccagcttcacattgatgcccagcttgttgagactggattgtgtcgccaaagcaataggctcccagttcggatcgttatcggagtagagaaacgtcaggctggtgggtttgctcgtcactttatcccattcggctttggctttcgtttcgtcatggttgtattgcattgccgtcgcatcgtagccccacatgccttccggaatcgggccgcgcatctgttttccgttaccactcagaatgccgttaaccatgccctgataatcggtagaccaggaaatggcccgacgcagatccgcctgattaagaggcgctttgctgttattcagatacagataggtaacgcgcagtgacggatactctgccacattgactttattttcctgcttcagggcgttgagttgatccaccggcagcgcatcggcaatgtcaatgtcgccacgggagagctgcaggcgacgggaggcactttcaccgataatttttaccgatacccgtttgaagttcggtttattgcctgggtaatgcggatttggcaccagaactaattgctgacctttttgccagcttttcagcataaatggtccggaaccggcggtattttgcgcgaggaagccgcgagcatcatccgctgcatgttcctttaagaccgccggattgataatggatgcaccgtcattcgccagcgtgtagaggaacggtgcgaatggttggctaagggtaaacttcaccgtatgttcgtcgggagcatcaatctttaaatctttgggaaatgcttctgctggcccctggccgatttttagtagccgctcaaaagaaagttttactgcttcggcagtgacaggtgtgccatcggcaaatttagcattatctttcagggtgaacgtccactctttttgatcgtcagacgctttccagctacttgccagatcgccttcaacgtcggttgagcctttatcaccgtccgttttgtgctgaaccagccgctgataagacgggtaggtcactgtccagtcgttattatctattgttaccgccgggtcgagggtttgtggatcggcggccttaccaatcaccagcatatcttttggtacggcggcgtgcgcaaccgggaaatttgtggcaaggacgagcgcgagcaatgtgggacgaaacgatatcgatctcttcatgacagtttcctgattaactgacgtgctgtgtgccaggggatataaaacaagagaattgatcagcgagcagagggtaactcgctgcctggggtaattcgaagtgccaccattcgctggagataccgacaaaaccgccaccagtcattatcgcattcagcaacagccgattgcgctgagcggctggcgggacggaagggtgataggcatgggagcgctcgtgcatttcatcgaaccctgcgcccatatcgaggatgttcccgtgctcatcacgaagcgtcaggtcgatcgccgtgccacggctgtgattagaaccgaccgtcacatcaacaacatattgcgggtctgggcaggcttgccacaacatcgcctgtgcttgttgtgggcgatacgcatcgtaaatcaccagttgtaagcctgacagctgggcgatgctgatacttttcgccagcgcggtaatcgcatccttgtgtaacagacaacgcgcttgctgataaatagctttacctgtgatgttatcagcgcaggcgtatttcaattcgatctccagatcagggaagattacggctaaatcaaccagttcggtggtatccgacataaacggttcctgtataagacaaaaattgctgcgctttccgcttatgcagatctcatgccatgccgggagaagcgccagaatgctggcttaaagttatattttttaacttttgatcaacatttgtgcagcgtagtgcagttttggtgcaagaggggaagttaaggaaggaatctcccggaatcgtagctgaaatcacagtatttaagtgacagtgtcaccttaaaggaaaacccgcgagtgcgggcgagaggaatttgtcagattttcagcggtaacacgctgctcatccagcctggaatttcttcggcgggaagggggcgggaaaagaaatatccctgaataacgcgacagtggatcttacgtagcatctcaaattgctctttggtttcgaccccttccgccacgacggttaaattgaggctttgcccaatgctggtaatggcttcaagtaaggccaggatgcgtttttccgtcagacaacgatcgacaaaacttttgtcaattttgatttccgttaccggaagactgactaagcgggataatccggaaaagcccgtaccaaaatcatctaccgataagcccacgcccatatcacgcaggatctgaatgcgcttaaagatttcggtatcgtgttccatcatcatgctttccgtgatttctaccgtcagctggtggccgtcaataccccaggcgtgcattgcatcagacacctgattaggcagttgattactgcgaaagtgcagtgccgacaagttaacggaaagcgccgggatatgaatattctggctacgccattctgctaactgacggcaagcttccgcgatgacccagcgcccaatattttcgatttcaccaatctcttctgcgagaggaataaaccgtgaagggggcacatgaccatgctggggatcgtgccagcgcgcaagggcttcgatgccgtacagttcacccgtttctgcgaagatttgcggctggtaaacaagtttcagttggttattgctaatcgcttctttcagcgctgcgcctaaaaccaaacgctcttttaccatttcgttcatcgccgggctgaagaactgccagccgttaccgccattcttgcgaatataatccattgcattgtgagcagtggagagtaggtaatcgcggtttttacccacgtcgtagctgatgccaatactcaaggtaagcgggaatggtttatcgtcaatcattatcggcttgctgaccacattccgtagctcatcggcgatctgggtaatgttactgacgtcgttttccaggctcacgaggacaaactgcgtaccttcgatacgacagagatactgatccggtttgagtttttcacgaaagcgattgaccacttccagcaatgcctgatcggcccacgcatagccaaggctatcaatcacatcctgaatatggtcaacaccgatgagatacaccacgggagagacggctttgtcgaccaggtcatcgaggtaattgtgcaggttattgcgatttggcagaccggtcatcggatcaaattggatgagttgttcaatatgctggcggctttttcctgttccagcgccagcgcggccatatgctgactgatatctgccacgcgttcgataaaggcgctggtttctgctcctgacgaggttttaatttgcaggatccccgcaggcgcgccatcacgctgacgaatggtcgctgaccagctttgcgcattttgaacttctgcaccgtgcgaagatgacgcccagtgtatcggcatcccgttgcgcagtgcgaacagcgaaacatgcgattcgttgagaacagattcgatgttacgacaaatgatttcccccatttcatgaaatggcgggctgctgcacatggcggcgagaatattgccttcaagctggcggatttgccgttcttcggtgatatccgagaaagtcattaccaggttctgcagatgcgcgagcacgtcataaaccgggctgatagaggctttaatccagattttttcaccggtgcgcgtcaacagcagaaattcgtcctgatcgcgggcggttttccatagcaactgttgtaaacgaatgcggttatcggcagggaattcaggaatgttcaggagtgtatcgggctgcataccgctggcttcgctaatgcagtaaccaaacatttcggtaaatgcgcgattgcactgcacaatatggcgttccggatcgaggacaatcaccggtcggtcgagatggtcaacggcaataatcaattgtcgagtctgttctttttgcgccatttctacgctggcatcccgtaccagcgccaggtaataaactttcccctcggcgctcactttcgatagcgcaaaacgggtccagattttactgccgtcttttttctccagctgcagctcccgactcatcccctcgacacgcgctttaccgccttcacggttatgacgaatgtattcaggatgcgcaggacgcaaatcccgcggaatcagcatatcaatgttattgccaatgacttcttcacgtttgtacccccagagcttctctgcggcggggttgaaaaacatcacttcatcattttcgttaattaacaccgcacccatcatattttgctcaagggcggggaaaaaaatgccatcggcggcattatccgcatcggttagcttcatgattacctctgcatcctggcgcatctaaagactggctttccagagttcaacacggtttctacctcgtcttttggcgatatacagagcttcatcggctatttgaatgaggcgctcatagtcaggatgaccattaaacatggcggcaccgatggaaagtgagagggcaatatcctcgccgtttgcggctttcagtttggttttctccacccgactgcgaatacgttctgcggtacgtaacgtttcgttttcagaagcttcagtcaaaacaatgataaattcatcgcccccgtagcggaaaacataatcactactgcggacgttgtcataaaaggcctgagagactttacgcagaatttcatcgccagtgttatggccccacgtatcgttgatctctttgaatttatcaacgtcaataatcagcactgacagcggtgtaccggtccggttggcatgggcaatttcgcgtttgaagatagtcggcaggaaacggcggttaagtaatttcgtcagtacatccataccgacttcgtggcgcgatacttcttcaaacaattcacgcagcaaggtaataatttgcgatacggtatttcttatctgtaatagaaacttcacccgcaaacttctgttattcaaattcctggtgttacgcatggtttgattgaaaataccgtcgaaatcctgaatcagacgggagatatggcctacttcggcaatgccgctaaaataatgtcgacctttatggttaaaccacaggccaaaatcagcctggcttaaaggcaaactactgcctaaatcagaatccagcaggattttatagataatatctatttcccatgaaagtattgaggctatttgccgttctttttcttcttcggcgttttccagtaacgagaagatacgatagttttcatcttcctttgaggcactactgtcactaaaggtaaacgcgcgggtcatcacttccatagcgatatcaatactgttaatcgagaaatggtagacctgaagtttttctgcggcagaataatccgaagagaagattaccggatagaggattttttcagcacccgaaaccccatctcgacaatttctaccggaattcctatgcgggcatgcacttccgcgacggtatgctggatttgtattagcctttcgacatcgtcaacctgggcagaaagcacgttaataatccagcgttccatcgcacttttcaactgccgctcaacttgttcattactcaagaattcttcggcatgcgggtcgatgcggacaattcgataaaactcgatactcagataatgagcatgcgcaagggcaatttctgcggctttagcacgaatgagaggatctgcctgttcgacaagtccggtccactcatctttcattcttttaaaatacatctccataattcacacccttataaggctgggaaatcagacggaatcaaaacgcaacgtgcgagatcgactaactgcaccatattctcctgaaatatgaagatatactgaaaagaaataagcgacttaggacagttttaatctacgctactgttcttcagaagagtatagcccatcgtaattatttttcggtgacagcgaatatcgtatgttttttcatattcatacatttttattaggggatttatggctgtttaactaagtgtggttaattgcgtggttaatttgactttagtaagcatgattagtagtgggatagttcaagagggtaacaagccggtgggtaaagcaccggcttgttacaaagtaagaatgggagtttaactgccccaacgactttgcagatagctgaccgcttgttgagtctgcggtttattcagatagtcctcacggaacaagatggtgccgctaatttctggtaccgcatcgttaagatcgagctgctttttcagttccggtacgccgccgttaatcatccagtctggctctatctttgaaggttcacccactttatagaaggcgataccgatatacaggcgggtcctggtcggtttaacgacatccgcccaccattttgccaacacgtcataacgcgcggcactccgtgagaacggccagtaaatttggggagcaatgtaatccagcaatccttgttccacccatcgacgggtgtcagcgtaggattcgtcataggctgccgcgcctcgggtatcggaaccgagcggatcgtgtgatcggttacgccacacgcctgccgggctaacaccaaattcgactcccggcttaatgcttttaatggtgtgcgatacctttgcaattaactgctgagtattgttgcgccgccagtctgcttttgacgcaaatgcgcctccgtatttacggtacgtttcgttatcatttagcagtgaacccggtgactccgtatagaaatagtcgtcaaactgcacgccatctaccggatagcgggaaaccacttcggcgactattgatgtgatccagtcctgaacctcagggatgcccgggtcgaggacaaagcgatcgccagacgttctgatccagtcgcggtgttgcacatagacgctcgccggttgttgagacagagtgctattcagttccctgatagtaccgggcttcgtattaaccgatacgcgataggggttaaaccaggcgtgtactttcatcccacgcttgtgggcttcgtcgagcataaattgcagcggatcgtaacccggattttcaccaatcttaccggtcataagatcggaccacggcaaaattttcgatggccacagggcggtaccgtccggcttgacctggaaaaagaccgtgtttatgccgagacgttgcagatgatccagtttgtcgatcatcgcctgttgttgtacacgggcccggctggtggggttactaatgttaaccgaggaaaccggtggccagtcgagccgagaaaccgtggccagccagatgccacgcatcggttgtgacgattgttgcgtcgtggctggtggctttgaacctgctggtggtgtcaccatggactctggaggcgtgcttttacaactacacagtaaaagtgccagtgcaactagtatcgctggtcttctaatcgttaatttcttgtttcgggagcagatatccatatgtgctggtttccggtaaacagatgtgcgctcattctcgtacttatcccggttaagtcaatacgacagcaagcacgaaaaagggagcgatgacttatcgctcccttgtcttataaccattcagacatggttagtgtttcttgtcattcatcacaatatagtgtggtgaacgtgcacgcgggtgcaggaagaagtgaccttttggtgcgttctgactgttgattggctccagagtgacgccggtattcgctttgcctttacgatcatgaacagcatagagaataaagggcagggcaagtaccaccaggaaactaacaaccagtaattcaacatacatatcggtagaatcaccctggatgttatccggcggcaggaaggaaacaataaacgccataattgaagtcagcagaccgacaattgccacgaccagtttcacccctttaccaccagggatattaaatgtgcgttttaagtcaggatgtttaagaaccaacacaatgtagccaataaacagcatgaaataagcacacagataaatcaccaccgtcagcgccagagcgatcaggaaggacatgttgttaccgccaccggtattggtgaggatgatcaacgcgatagaagtaatcaccagctgcgaaatgaccagcgttaccggtacgccatttttgttcattttagcgaatgccgctggcagcaggtttttctgcgctgtgacatacatcccgcgagaaggaccaacaatccaggaggcgatttccgccagaacacccagcaacagcagtgcggagatcacgcgaaccgtccactcaatttccggtgccacatgggacatcagaacggtaaaggtttgcattacccctgcggagaggttgatttcattacccggaatgaccatcgcaatagacaaaccaccaatagagcttaagcagattgccgccaccatcagcagtaacatagccagtggatagtcgcgccctgggttactcatttcattgacgtgggttgcggaagcttctacgcccatataactcaaaatgaaggcaacaaatacaaccagggtgcccactttagagaagtcagggaagaaggtcttcgaatccatttcgatagcaacgggggcaccggagtgcagataaatagccgctaatgcgatcaaaataaatgcaggtaacaggataccggcgaagaagccaactttagcaattcgcgccgtgtatttcgtgccaccaaactgcgttaatgccagcgcccaaagaatgatgagtgctgcaatagttttggtaatggggtcttcattcagcgctggccatttcaggatgtaggagagtgcccctaacacgaaatagagcatcggaataaaaccaatggcgatttgcagatagccaaatgagatcgctgcaaatccccatctcggccccagagtatttgatacccaggcgaagacaccaccttcttcccagccgtcgacggtggccatttccgcagcacaaagtcccacgggaataaaccataaaatcccgcctaatagcaggaagaagactaatgaaaagcccgatgttgcgaaggtagggtattcataaacagccattaccatcgatgccgttatggcaaagaatccgagtaatgtgagctgcttagctttacctgtctgtactgatgtagccatattatccccctaaaacggtattcctgtcggaaccgcacctgttttgttctgaagcgtattcagaacaatattttccgttgctaatgccagtgaacagactttggaaattgtcccgaaacgggttcgtttcgggacaccgttaccgttaaacgttatcaggtatgtttaaagctgttctgctgggcaataccctgcagtttcgggtgatcgctgagatatttcagggaggctttgtagtcttccagcaacagttcagcaaagtccatttcgaagccgcgacgacacataatgcgcatcaccacgatgtcggtggcttcaccgccgagagtgaaggccggaacctgccagccgcgcagacgcagacgttcagagaggtcgtacagggtgtatcccggatcttcaccatctttcagtttgaagcaaaccgccgggatgccttcgtccgggcgacccgtacagatgaactcatacggccccagtttggcgatttcatccgccagataagcggcaacctggtaagaggcgttctgtactttggtgtagccttcacgaccgaggcgcaggaattcatagtactgtgcaattacctgacccgccgggcgggagaagttgatggcgaaagtaccaatttgaccacccaggtagtcaacgttgaacaccagttcctgcggcagcgcttcttcgtcacgccagataacccagccgcagcccagcggagccagaccgaatttatggcctgaagcactgatcgatttcacacgcggcaggcggaagtcccagacgatatccggggcgacgaacggtgccaggaagccaccgctggcagcgtcgatgtgcatgtcgatgtcgatacctgtatcggcctggaatttatccagcgcatcgtgcagcggttgtgggaactcatagttaccagtgtaggtcacgccgaaagtcggcaccacgccgatggtgttttcgtcacaggcttcaatcatgcgtttcgggtccataaacaactgaccggggcgcatagggatctcacgcagctccacatcccagtagcgggcgaatttatgccagcagatttgtaccggaccgcacaccaggtttggtttatccgttggtttgcctgcagcttccatacgcttgcgccaacgccatttcatcgccatcccgccgagcatacaggcctcggaagaaccaatggtgttggtgccaacggcctgaccatttttcggcgcaggcgcatgccacagatcggcaaccatatttacgcaacgcaggtcgatggctgcggattgcggatattcttctttgtcgatccagtttttgttaatggataaatccatcaatttgtggacattttcgtcgtcccaggtctggcagaaagtggccaggttctgacgagcgttgccatcaagatataattcgtcattgataatctggaatgcgacatcgtcgcgcatttcgtgcagcggaaaacgttttgattctgcgatagtggaaatagacttcgcaccaaaacgtgaatcgagtagttccgaccttaaatccgttacttgcttcttatccattttaaactccttaaaatgattggatcgcattaaaaaagtaggatttatcgataaagtaagcaagtgcaaaggactcgtatttaaataacaaaatcctaatgttatttatcgtgagatattacgcgaataatatttttcattgaaaaacaatgcaatatgaaattcttgggtggtggtaaggtgttttatgctgttatttttatgcgcattctgtgtctcctgaattatcacgtaaaatcagaccttaaaatatcactattagtacttgattattattttgaacgcatttataaaattattatataaaaatagcgaatattgctaaaatccccgccaacgatgtgttgacggggctgttattattttggcaataatactccggtataagtatttaccggatgagaaagatattgtttaacggcagtgttaacattctctaccgtcatttgtttcaacaattgctcctgctcagtccatgctgcaggatcgtcatattgaataagactatttacaatagtgttcgctaattgttgaacgctacgctgttggatatcgaggctgcgctgaacgttttgctggtattcattcagttcttgctcactgatccctttagccagacgcttaaccatcacttcattcgctaacgttaacagttcatcatgtcgttctggttgacaagtaaaagccagcaaatgactgatatctttggcctgaggatcaaccgagaggcgagaagaaacgctgtatgctccagatgcctgttcacgaatattaacacgtagatcttttgccagtgcgacgttaaaagcatcgagcgccatacgcgtcgccagattaacaggtgtccgggaatcataacgcttccactgtgaaacctgtgccacaggttcattttgttcttttacagtaaccgatgcgttgtccgtcgcgcgagttaatggtttacctgcggctaatggcgaatcagagtgtttgattgatcctaagtaacgcgtaattaacgccacgagtttgtcttctgagacattaccgacaatgacaaacgtgatatccgctggagatgaaaacaactggcgatcggcagccagcgcatctgcggcagtaaactgtacaatctgattttcttgcagtaatttcgtgcggtcatcagcatagcgcgtctcatacatctgctgggcgaatttctccgctggacgctggtcgagcgttttcaacgcctgaatttgagcattttgtagcgatgcccaaatattgtcgttaatcgtgctgtgggtgattcgctggttaatcaactgaaaaccaggttcagggttattagtccgcgcgctaacggagagcaacgtattcatgccactgactttactgctcatggttaccgaattttccgcactccagcgtttcaggctggaagaggagagctcaccaacgccgcttccgcttactgctttatttgccagcgcgataagtgatttttgctgcgcagggaaacttaaatcgcctttattcgatacggcagtaatttgtagcttttgctcttcacccgcggattttgccagaataaccctggcaccattggaaagtgttaatgatgtcagattctcagccagcgtttctttgctgctaatttccgcctgtgggtcagcgtctactgttaacgataaatttctgcctgggaagatgtaagccgccagctttttgttggcgtactctttttccagcgccaggatagccgcaggagacaatgcttttttggcggcaagctcattgtttaccatttgctcccaaaatgcgtcctggttctttcttaactgctgccatttttccgccagactttgcacggtaatttgctgccacagacgtttcgaaagttgatatgtctcttccggcgacaagaacggcgtattatttaatgagctggatgccaggcgactggtcagcatacgtaaatcacgttcagcttgctgatcaaccgcatttttcagccaggtgaggcgggtagatttgacatcatcgagttcttcagcagaaaaaccatgctgatcaatggttgccaactctgccattaatgcattcgcagcttcctgcatattatcgtctcgtgcatttacacggaaaaacagcgactgataatcgggtgcaattttaacgctgcgcgcagtgccgccagaaatagtcttcaactcgcccgactgtatgcgttcctgcagacgttgattgaacagctgaactaacatgctccattcagcttgttcgataaagctttgctcatcgttcacttgtaccattggcaggcgataatagagtgcgatgccgttcacccggttttctttatcattaatgatattaaagcgcaggtggttttcggcttttgtcggccagacgcgattttcagctgctttgttagccggaagcttacttaaattatcctttatcagcgccagcgcttctttactgtcgatatcgccgaccacgataaaggtcatattatttggttgataccagcgttgataaaattggcgcaattgtgccggtgtgaccgtggcgacagtatccatcaggccgataggttcacggtctaaattacgggtattagccagcaggaaagggcggcgcgcctgagaggtgcgccatttcgcatcctgatgggcacgccattcctcagtaattacgccacgttcagcgtctacttcgagtttttcaaaggttgcggcattactccattcactgaagattgccatcacttgttgcagattttgtttctgcgtagtcggcaaactcacctgatacaccgtttcgtcatagctggtataggcattaacatcgcgaccaaaacgcaggcccattgactcaaatgtttcgatgactttattacccggccatgtttttgtgccgttaaacatcatatgttctacaaaatgagccacgccgcgctcattgtcttcttcctgcaatgaaccggtatgaatttgcagccataaatttacctgatcctttggatgagcatgcggataaatcatatatcgcaagccattgcccagttgcccggtaattaacttttcatcctgcggtaaggcggcggcaatcagccgcccggggagcaacagagttgccactaacgtcagtaagaaacagaggtttctcataattatctccatgcgaaaaccgggcgaatttacccggttaagtaaaatccgaactattaaaatttcatgctgacatcaagccagaaagtacggccactggcgtaggtcgccacaccggtattcgttgtatcaacagcggttttgctatccaatacattgagaatatcggcactgatcgtcaggttttgttgtttcagaaattgtggcgtccaggacaagcgggtgtcccaggtcaggctgctatccagtttttcgtcaacatactgcttgtaatctgaatattcgctgatgtattgcgcatttgtcttacccaggataatgcgagctttacgcgcttcttgccaggccagcgtattcgcccacactaacccgctcggttgatgcgtgaaatccatgtttaaggagatctttaatgggttattaaaatctgccactggaacgctatcgtaagaaaccagattaccgttataaaccacctggttatcaccggtattgctctcctcataaccattgtttaacgacaagttgcccttgctcttgatatagctaaagacaatttgcgggttaatatctacctggctgatatgcaggggttcggccagttcaaaactgaggttgaacgaatgcgtttttgttttgccgtcgttgttatattcagtaatggtggttttagtcgcgctgtcggtacgactgcttttgctgatttgatcatgcgcttcacggtaaacatagtttgcgcgcgcaataacgttcttaccgattttctgctgcaatcccattgccagttcatcgttataaggcgttttcaaatcctgataacacgtcagggttttattgcctgataccgattccgtccagctattgcggatatcacgtaatcccatatcaagaatattcccgccatagtaacggttataacctgctgtaatcattgaggtttgatcagcaaaaatatcccattccgtcataaagcgcggggagatattgtggtttgacagatagttgtcatagtcataccgcacgccgggcattaatgacacattacgccagctaatgcgatccgccatatacagcgtgtagttgtcaattcccaggctgcctttacctttatggtaaatggtatggttagttttctttccggcagcattaatcacataggattcagactggttatggcgttcagtccacgcatcggaatagatgtattccgcgccgaagtagggttgatgcgaaacattacccacggcgaatttttgccagtccaggcgtgttttgaaggtgtaattatctacagcctgggaaatgtgtcctaatccgccactggtgcaacgccctgtaatatcaccatatgtacatgaaagttcggtgtaccagatgtcatgatcgtgacgggtataatcactaatatgatcccaaccaacggtggtacgcagtttggcccatgcgagctgcgtatccatatcccatgccagaccgtaggatttattacccatttcgcgatcagactgcgggaaggtgctggtattataatcacggctggagccggtatattttaaggttaaatcgtgggtaaagcggtcgctggcaaaccaggtaaatttgctcaatgcagtatcgataacgtttttatactgtgcccgaccggcgacaatgccgtcattcgaaacataatccgcgcgggtgatatcagactggcggcgcgataaaccggcggtaacgccgaagttatcagcgagttcctgattaaacgacaagatataaaagttctttttaaaatctggggagtaataagtacttcctgaagagccttgattaaatgcgctcttgttattctcatcgatatgcgatgttaaccagtccgaacgcgtagtgcgataacccaatttaaccttgctatcatcagcgttgaagcgtttgatctttgcatcaattaccccgccattgaagcgaccaaattcaaccggcacaaaactgtcataaagcgtcacattgtccagtaagctgacatcaagataatacccctgtgacatcccgctaatattggttgcactactggcatcggactcattcgctgggttcaggttattagttgcactaataccgtcaatcaaataggcattctggtagggcgacgcaccgtgaatagagattttctcagggcgaatatctccctggttcaacgaggtactttgcgttgaatccatgcgtaccgcagggttggttctcagcagatcgctgatattgccattcccggtcggtaaacgctcgatgctttcactggtgtaatgcgtgttgccgtttacgggtacagggacaggagcatagaccgtcatctcttcaaaaaatgcatgtacatgtttttgtcatcgacggcctgcgccacatcagcgccacataaaatgacgccaggaataagaactcgcttcatttatttatatctccgtacagcagggcttttattgttgttataaaaccgtgctaatgtcacaaatatcatcagccaggttccagacaccgggttgatgtgtaaccataatgacgccgcttgtgggtagtttttcacgcactaaacgcagtaagcgtatagcctcttgttcctcaagatgagaggtagtttcgtcaagaaatatccatttcggacgtcgtaaaattaatcgtgccagggcgatacgttgtttttcgccgctggaaagaatatctccccagcgatcgtgctcatgaatacgcgcagccaatttccccagaccaacctgatgcagtacttcgctcaacgatttatcgtctacgggcaggggaagtgctttacaaataatctctttcagtaagccgcttttgattaacggtgtttgtgacacataccaactgtcagcaggagaagaaatatcacctttaaaccacggccagcagtgggataatgttttaagcagtgtggtttttcccgcaccagagtagcctttcagtaatagccatttgcctggcgaaacatgaaagttcaagttctctaatatgatcttattatcaggcgtacgaatactcgcattagccacttgtaccgcatgttggcaatttttaggcttattcgtagggcgctgttcagtgagttgatggaactcatacaagcgatcgataaccgcagccagctcagcaagttcgtcatatttataaataaaccagcttaaattgttcgatactagcataaatgcctggcgcgatttcattagtccgcccagattgatctgcccgctaataaactgcggcaataacagaaagtagggaagaacgctaagcgagcgcgaataaatattttgccagtaatcaagccaccgctgacgattcattaaacgatgccagttctctttaatggtatgaaaattgtcgctcaactcctggcgttgtagagactcagcattgcttagcgcaatcagttctgcctgcttattatgctgcacaagattagttcgaaatgtcgcttcgctacgttgtttttccacattaagcggacgaatacgcttaccaaccttatgggtaaataaagttccaccgatcacaatgagcacaacggtatagaccatatacccctggatattccattctgttccaccaacagtgaatgagagcgtacccgcgctttgccaaagaataacggtaaaggtgatcagcatgctaagtgactggatgaagccaaatgaaagactgagcgttttgctgattagtaagagaatgtcttcagcgatacgttggtcagggttatctgtatttttatgctcgccgtagatctgcgtgaagtagtagtttttatctgcaaaccagcgattaaggtagtaatctgttaaccattcgcgccagcgaatagtcagcagtttaattaaccatgttttgttcacggatattaatacaaagatccccagcagggcagggaaccaaaggacaagctgccaaagcttatcggtttctttctggcttagcgcattgaaaaaatcattattccagtcgtttaaccagacctgaattttaaccacgccaaggatcatggcgaggataataatgattaacagcactgaagttttattattcttacgcagccaaaagggcttcaacagacagagatactttgctatcaacatacaaaacgtaatgggaatggttatcattagcgaaaattgattgtgccatccaatgattatctatggcaatgatttactgatgaaatttatttaagtatcatttaacaatatgaaatataaaggaatatttcattttcagtggttatggttatgctattgataatcaaggatattgctaatgccctgatgcataccacgtaagccaggattttcgcaagggaagatgatgatgacgaaacacccgacaggaatttatgtcgggtgccttgttaaggtcataagaaggaggctaagaatggagttaaaagagagcgttattaattattctccatttgttttgcaacatccataatgtggtaaagcggtactctgttcttagctaactccaccatggcgttcatataaggtaccatggttgaaaaaaggattttataaccttcgcaaaaataagaaacagtctcattgtttactttagtaatacgatgcttaggacaaccgccattgcagataggtttatatgcacatttcagacatttcgctgaaatccgttttttttgcgctgtcagttgtacactgttcatcgttttgagttcagatttattaatgtttccaattttgtactgtggatagacaaaatggtcgcattcataaatatctccattactttcaacaaccagattatccttgcaggactcctggaaaatacaactggtatgcccattccctaaaaaacggctgacaaagctttcaaactgacggatgaaaatttcacccacatcgtttttaacccattgcataaaaatggttgacataaacttgccataagccgtgggaggcacagaaaaatcaatgatacggaatgtgttctcactatgaccactgaaatcaatattcggcgtcccggtttcgagcaattcgataaattgcatatgtttactgccgatagattttaaaaaatgataaacctcaagagggtaatggacattaacgttattaatgacggttaacgtattaaactcaacttgatatgatttcagacgctcgatggctgctatcacttttgcaaaagtaccgttacctgaattactgcgtctgtaacggtcatgtagctcctgggggccatcgatcgagataccaaccagaaactcatgttctttgagaaaagcacaccattcattattcaataaaatgccattcgtttgtaatgcattaaaaatacgtttttggcctgcatagcgttgttgatagtgaataactttacggaaaaatccaggccagccagagtgggttcaccgccttgccaggtaaaatagacctgattgccagacgctgcgatatattgtttgatgaactctttcagagtgctgtcatccatccatttttcatgagtaaactgcgactctttttcaaggtaaaaacagtaatcacatttgagattacattgaaaactggagggcttggctgtaacgtgcatcgctatctcgctcaataaggcggcggaaaattccgccgcatgaaggtttagttatttcgcttcgcttagtgctttcttgatattgttaaacttctcctgatttacttcgctaagcggtggctggctgctgtcgataaactctcttaccacgccttgcatctctttaacgacctgcggattggcggcggcaaggttatctttttgctgtagatccgtcagtttgtagagacctaactgattgttttctactgtatagacaagcgaataatcgttatttctcaccgtataagagaattggcttaagtcctcagtgttggggttatgcgggtaatcgtctgactgatggcgaacaaatttgtggtaattatcccagaatggaatattttcctcgtcaaaccagtgagaataagaggttatccaggtcagatttttatgtggctcgccttgtttcttatcttgcaaccagggcagcaaggaaacgccatccagcttaaggtcttttggaatgctgatatcggctgcatcaagagctgtcgggtagaaatccattgcggaaatcagcttgtcataattaccgggttgaagttttcctttccaccacataaacattggggtgtgagtaccgccaggataggtctgactcttatagcctttttgcgccccgttcagcggcagaggaccatcgataaccgcaccattatcggaggtaaagagaataattgtattgtcatactgtccgtttttcttcagttgttcgagaatgcgttttacaccctgatcaacagaataaacggaagcgtagtagttatctgctgtttgactaccggtattaaattgcttctgatattgatccggtgcaggattatcatttggcaggtgcggagcattataagccaggtaaagcataaaaggctggtcaagtgttttggcacgatcaacaacgccaattgcctcatcggttaactgatcgctgatataaccttttgcggggacacgttcacgatttttgaacagtgaaggggagttgtaatatgccgttcctgcagcgtggaatcccataaagtaatcaaagccacggttttgaggttgccattcttccgcagaaaatgtggtgaagttgtcatgatagtcacgcgtttgtttatcttccggtaccggcacattactgatttttgacaagtgccatttacctactgctgcagtgtaataaccatgattctggaataattcaggcaagaaagtttctgttagcggaataccatcctgagcatcggtattggaatagacaccaaagcgggcgggagctcgaccggtcattattgcggcacgggaggggccggaaacaccgtgtgccacatagccgttagtaaaccgtacgccttcatccattaatgaaaggagcgtcggcgttgatttttgtgcagcttcaatggctttatctatccctattttgtaggtatcgacaacttcacgattttccattgtttttgggtcaaaagatcccttatcaaaaggaagttgtccataaccaagatcatccatggttagtacgataatatttggctttcctttggtactgtattcagtcggcgtaaagtctgagaaagcaacgtttgttttggttgctttcagctttacatcatctgccgcatgagcagcaaatgcagccataccagatgccagtatcaaagatatcgaggtacttacgacacttttctttaatgcagacttcataaatgttcctcttcttattgtacttaattccgaagtaattttacgaagagaaataagtggatgtaagtgaagttagtcacataaagagatagcagatttagctaaaaaaagggaaataacagtccataaagcgttgacattactttctgttctattaagtaatttctcgccgataaacaactaatttattgatatttaataaattattgcattttactgacaaaatgccgaattgagatcataaataatcatgcaacaggttatgcaagtgcataaatatgtgatggatgtcacttatttatttcaataaatatatcgcctaaaaacaacgcggggcagggaatggctgccccatataattcttacgtagcgtgcgtggttgactactcgttagcaaataatcaaatagctaaagcactcatcgtgttgcccgtattcatacccgtgtgactttgacaacggtactccttagaaactctcttcggactgttgccgaaatgtttgcggaacgcataaataaaataagatgtactggcataaccacattgttcggcaattttattgactgaaccttctacgcgtatcaaattttttgcgtgctgcattctggcatctaatagaatctgtgagaatgtcgtttgctcttgctttagttttttcttcaacaggctttcactgatgtacaggcagtcacaaatatctttcagcttccatgggtgcgccagcttcatgttgacaatatttctcacttttccggaaacggatagcacaccgttagttaatagtgtaatgaaacctttgcatgcggcaaaaatagacaggcaagaaaaaagcaaaagttctgaaaaattatgatgattgcgttcttccgagttgagataagcaatcatttcattaagcaatccagtcggtacatttgaagcacgtaaaaacttcgcaggaacaggcaccgtcactgtctggatgttagtgcattgtagatattttttaatggtattttcagtaaatccgatctctttaaaatgccgctcataaggttcaaaatgcgtacgaacagcgttatctaccatcaggatctcgccgtcagagaaggcgtaatctttatctaaaatgttagcgttgaaggcatgatgaataaatataacagaacaaacgagcgacattttatctccttaaaacaataaagtttttatcgatacttttttaacatttcatatttataatttgctgtttattttcagtcttgcaaactattgataatgaaatgtgtaagatctcttgcaatgcgacccatttctgaaatacccagctgatcaattgccgaaaaaatggctatcaacgtaagggtcagtaataagacaaccacaattacagacatgatttctttatagttgtctctttgcgtgattttgtttttcactgtggtcgcatgcatttcaaatatgtttatttagcggataacgttaaaaatcgttaatcagtatgcttaatataacaggctggagaaaagaggaaataggactggcacttcagtactgagcggagtttcttacagctgtaggcagaggtttatatcttatagtgtgtggtttaatttaatcaatgtgagcaaattgcgcgataatagtcaatgagaaattcttctgctgtgcggatgacagcagaagaaatgaggaggcgaattaatttgatggttctaattcaaccggaatacttttataaccaggaatgccacttaatggatcgtggttatcaagagttagcatgtgattcgattctggaaataggtcaccagtgagcggtcagccatagggtaaatgaccacttttaatctatccatgcggcgtgagctgcgcttaccgtctggcgtaagcgcaataagattaactctttcgccgttttttacacggcaaattttagcttgtttagcactcataaagaccacatctcgttgaccgaatacccctcgatagcgatcatccataccataaatcgtcgtgttgtactgatcgtggctgcgtactgtcgccatgaccagcttactgttaaacgctgaagagggatcttctaacagccctttgctggtaatgaaattagccttacctgacggcgtcatccagcgcctttcagcagctgcatttatcaggtgaaaaccaccgggatgacggatgcgctggttatagtcggcgaactctggcagcacagcttcaatgtcattgcgaatgcgatcataatcttccaccagatactcccaggctaccacgctctggggtagtgttgcctgggcgattcccgcgaccacagcacactctgatttcagcattacaccggcgggttttaacacgccacgcgaggcatgaatcatcgacattgaatcctcaacggttaccgcctgcgcaccgcttttttgcatatcaatctcgctacgccccagaaccggcagaatatagctatgccgtgcggtcagcagatgagagcggttaagcttagtggctacgtgtaccgccaaatctaattgcgttaacggtacagcgctcgcttcccgatctggcattgccagtgcaaagttgccccccatgcagatcaatgctcgagcctgccccgtacatattgcttgcatgctggcaattgcagcatgtccaggtgcatgaggtggggtgaagccatagcgctcacccaggcgagccagaaactctgcagacggtttctcggtgataccgacggttcggtcgccctgtacattagagtgaccacgtagtgggcagatacccgcaccaggcttgccaatgttacctttcatcaacagcaaattgaccagttgctgtacgttctgggtaccatgttcgtgctgagtgatccccattccgtaacagataatggttcgttcggcagcggcatatgcatcagccagttcggcgatttgagtctgacttaatccagaaatacgttcgatatctttccactcggaattgagaacgtcacggcgtagctcgtcaaagccgacggtatgcgtttgaataaattcgtcatccagcaatgagggccgacctgcggcgcttgcagcatcatcgcgctcaattaacaggcgcatcatccccttgagcaacgccatatcaccaccaatgcgcacgttatagtaggcactggccaactgagtctcagagttcgtcagcatttcaaacgggttttgcggtgcagtaaatcgctccaggccacgttcctgtagaggattgatggcgatcattttcgctccccgtttcactaaagcgcgcaacgaagtcagcatgcgagggtggtttgtaccagggttatgcccaatgcaaatgactaaatcgcacttctcaaagtcttccagcaacacggtccctttacctacaccgatactcgctgccaaacccacgcttgtcggttcatggcacatgttggagcagtcgggaaagttattgctcccgtattcacgggcaaaaagctgataaagaaaggcagcttcattggaagtgcggcccgaagtatagaattcaacctgattgggatcactatagctttgaaggcgtgcgccaatttcatcgaaagcttgttgccagcttaatggcttgtaacagtcgctgacggcatcatatttcaaaggctgagtgagtcgccccgcagcctcaagctcgtggtctccccaggtaagtaatgattgaaccgtattctcagcaaagaaagaggcgtttacctgcttatccgtgacttcccaggcgattgcttttgcgccgttttcacaaatgtcgaatgacgcactgtgcttaggatctggccatgcacaacccggacagtcaaagccctctggcttattcatgtcaaacatggcaataacatcctggcgtatatccatctgcttacgtactgcattcgctacggatttaacagcaccccaaccaccggcagcaccctggtaggattcaattttttcttcatctacttatcctgtgtggaaatgaattattaggatttgtaatagcgatgatgcacagtacatacaaagggattatcgccaacatggatatataagagtaggggactactctctttctatttttaatctattatcgttaaacaatagattaaatacgataaggtaagcatcatctctcatagtgtttaaattaacatattttttaatataaaaaataagactctggcttcaattgtgcgcggattttcttacaggtgtaggataatagctttcacaaaataattatccgcgcaattttcgtgaatggagcgcatagactaaggtcaaaatcacaattattcatagataaaagtgacaccaatgactgactggacggttccggctgaaactttgttccctgtttgtccataggttgcgcttaaacccagaggtactttgcttttatttactgtccccaaggagacattttctcccgtagccagtatttttccattacgcatcagagagacacccactcccgatgcttttgttgcatctggtgctgtgttagcaaacacttgtcgggcactgtcagtggtggcacccgaaagataaaatgagagcttttgttcgcttgagcaatatacgccaaggggtatttctgcgcttccaggaaagtccgggagatccacggtgacattacgactatcaacggtgcagccgcctgttggcataacaacattgttatttgaaataatattccacgtaaaattacgcggatttccgcttcctaatgttgcaattttatacatatgaatacgggcaatgacttcccccgcttttatgacaactccaccggccgccccaactggggtaatatagagttttaacggtaatggcatcggtgtcttatcaccaatatccaatacgttggtatttgtcgtcaacgggaaggggtaggtcacattattccagtacagcgatcctttatatgactgtagggagcctgcgaaagctgagccttgtaccaggtttatatgatcagtgtcgtaccagccgccgtaatcattccagcaacttatatgctgagacaagtctacaaccagattctggcccggctgtattacagggtcgagattaacataaacagaggttgtacctgctccaatacttgacccgccatcgacattacaactgaaggcaaaaactttgcctgccattaatagaagataaataccgaacaggacctttatactgattgttttacccatgatatatcctaaggttaaaaattgatttaaaaagaaggctaagaaaatcgaatcgacgttattgccaggtgtagatcacattgattagcgcctcgatcgttccctggcttgcgtttccattcaccgtgatagctcttgccttaagtggaaactgtgcattacgagtgatctcatcaacaataaccgttttgctatcgccattttttaacgtcgcatcctggtcatccctcagctctatctgaatattttcggcagtaccttcatttttgtaataacccgtattgtcagttgaacctgtcacgattgccgtcactgcacttgtttcaaccggacaatcggttaatgacaaagtaatattgtgccagccagatgcagaaccaggttgttgcagattgcgcgtataaagatccccgagattaacgttagcttctttggtttgaatagtgcagggtttagcgactacccgaccattaacagtgatagtgacatcgacggcctggagagttgctgtgaataacgcgcaaaacgtagctaacaggaacctcttgtgaagtcttttcatatctgactctgattattgaaattcaagggtaaaggttgccgaagccctcaccagtcccggattgacggacttctgagttgacttcagacgagcggagtaaggcaaaatattgttctgttctggtaccagtgggatccactgcatcccggcatgaaggtcattcagtttcaccggacgcatatttgcgtccaatatttctatacccaaaccggaggccgtattgcttccttcatccagtttcaacaaagtattattttctgcatcctcaataccgttaaatgcaacccgaacccccgttgtccctttgctgcattcacttaacgtaatctgaaaagggacgactggacttgtgctaccggtcgttggaaattgtctggcactgtttttttggagatctacggtaaaattaagcgaatccgatgagactgtgcagccataatcgaggacgcgcccgctaattttaataacgctatctgcggataaagcagaataggtggttaaccccagacataaaccgaggaaaataatgttattgtatttcataatctattgttccttagcgacagattgctgtctgctggttcagtaaggtaccaggagaaacttcaggaagcttgtactcgacaatacagtttgagtttttatctttgccccatgaaacctgtaatttccctgactgtggaagtccagtcagataaacctgaccgttttctgcgacaatgctgccatttttattctctccgtgtgtgacaattgcaccgaatggaacgctcttattaccgtacttcaacgtcattaatactttcccgccgatttgtgcattaaatgttgctctggcaatagcaccgtgagttgggatgacagtgaccacggtttcatccagttcaacattatctgcaagggaattcgcgttaagagcaacacggttttctctatattctgtcgcaaatggtaatatggcatagccacgccagtcggtatgaattccggtctggttctctattttgacattatcagcgccaggagccttaaccagaaccattgtgtcgcccagcggctgtccaaaggtgatgccatcagcatgagcaataatcccaccactcattccgtaataaatctggctgctgtcaccattccgactgtaaccgacattcgtattaccgtaagctccacgataattaagagaactgtaaccactggtgccagacgatgtattacctccgtgggtgttaccgacctgaacgctataattcaggttattatccggcagcagagtgccataaacccccgatagattggtcatgccgcctttcaaatcgtttgacatactgtaactggcgtttgaattacgaaatgccgactgactgtctgtacgcatccaatgactgaagggaacattaagcgtaaaagcgagtaaatgatcccgatcgttttgccatatattattggaatagctgtaattcagcgaagtcgtaatatcaccaaacggcacatttaatccaaatgatatttgctggtcgctgcgtgacgtgttccagtaactttggcgactggcactgaaaaatgtcgtaccgtaatttccaagctgctgagagatgcttatttgttcctgaccacgcttactgtagaacagattaaaataatcaataaattgtgtctgctcattggtgtctccggtaggaggcttgacggtgtaaccactcattcgactgtaggcactgtcggataagttataaaaaccttgcgtagaatagcgatatcctgcgacctggatattggttcctgtctggtagaaggatttgctgtagacggatttaaccgattgcccgctgtgacgggtgccatctgcaagtgtcgtattggcctgcgtgatatcgaaagaaaaggcaccaaaaagtcctaaatctttaccaataccaaggttgaaggcctgataatcttctgcaatttgcattccgccataaggtgtccagtttccttccagtccatgcatcaagctaccttgtatgaacttgggggagctttgcaggttatttccactacgatattcccccatggcaagcgcataacgcgtatatccagcacgttggagaaccggaacagacgaataaggaacatataatgtctgaatactgccgtctgcctcttttatggttacttgcagatcaccaccattggcggcagagttgatatcatcaatagtaaaagggccgggtggaacagtagtctgataaacatcgtatccgttctgttttacactcacttgtgcggtgccacgggcaataccatgaatcaccggagcgaaaccatgttggctatcgggcaacatcgcttctgttgaatttattttgaggccacgaaagttcacactatcaaaaatatcgccatcggtataactatcacctaccgttaaccgtgagcgtaagggaataatgtcacgttcagccgacgtattgatatgctgccatttattgctgttagatgaattgctactcccactgttataactccacgttgagttatcgcgcagtcgccaactaccaatgttgatgccactctgtaaattcaaatatgcatagttggattttcctgcattatggttactacgattattaatggaattaccattaaaactataatttagaagcccagcatttattccttcttcccacagttcaggagaaacatagccgcgagccattctgccaacataaatttgcggaacggagagtgacaaatgttgctgaccaacatcaaactcagttgatgcgtcggccaaacgatcctgaagtggtgtgcatgcgctgttgtccggcacatgtttttctgccgaatgttctttattgtctaataactctgatttttttataccaagactgacaagaagatctgtactcaggcatgggatgagttctgcattattatcatctgcaataaaagtaatatcccgactagtcataaattcatcgttcaaataaatgtcgacccgatatgtaccaggtggtgcctcgcgtcccttagtaaaggcggataaatcgacagattcagcaagatcattgcttaaaaaccgtggattaaaataatactctgcgtcaacgggaaataccgcagttgctaagccaagggcaatggtaagccgtgcaaagcgaggcattattaacacctgatgcatacgatatgccttaaatgcggcacgaatggctgtcattattaattccgattgagtttattattaattaggtcactggcttactgcatggttgccttaatacgcggagttaatgcaccgtaatcattgatcgtctgaaaactgatatccccggttgcagcatgcgtgatatccaccgatacttcaccttttggcggcaccatggtgtttgggagattgctatttcctgctttcatatttgttacggtaatgaaatagggcgttggattaataagcgtgagtttgctaccgctgcgacgaaaccgaagcattgcaggcgcttcttcaggtgccattgccaggttcgtggggcgataaaacatttttatgcggctaataattgccagctgtaatgtattctcattcttctggtctttttccatagcaggaatagctttaacattcacccagaacaggctttcacggtcgcctggtaactgatgattagtagcgttgattatccgcagcgtattctcttttttaccttgcatggaaaaaagcggtggggtaatgacaaactgggtgtctttttggtcacctgcattttctatccatgactgaatgagatagacactggcaggatcattattcgtgacaggcaataaaacctgtttctggtttgccggataaattacccgcgtcgcacccagtgcgacagctgcgttggcaacggtgctatggcaagcaaagagcaataaaagtaacactgtcgccataaaggaaatagagtagggggtacgcgtagtttgcatctgatgcattctccatgtgttaagaggataagcgggaaaaccgttacatcagacaatagattaatgttgctaatacattggcgagtcgccgggtttccagacttaatgcgtttgtaataaatgttggttctcttttaataggaaaaccttgctacaaagtaaatattttaaataacagtaagtttaactactgttgtttattgatagtttagatattatgtgatttttcatagcgctccaaatacaaacttggtaaattgctyscaatwcaaaacttggtaaattgctcgggtgtgcgtagccatgccacacacaccctgtttcaatttcagatgacgtatagccaccttaagattgaattatagatattgaactttgaaggtcgcatcagcgtttgcagtaccagctacggactgcccgagagcaatataacgagcctggaatggcagtatattcgtgccatcaatcaagtcggttttaacactaaaagtggccccatcaagtattaatacctcacccgtacggtccaaaatttgaataccgacattttgggcagagcctgccgctgaactctgcagcgctaacgtatcgtcattactggtgacagtagtacccaggaatgcaacagctgcattactggaaacattggtatcacaatcattcagcttgatattgaagccaacggcggagctgaggtcacccgctttagccaggcgagaagaacgaacctgacccagctcaaccgtttggttcattgattctgaatcaattgcacaagcggcatttaccacttcacctttaaaatgaataacaccgccattaacagtggtcgttactgattcatcaccctcggctgcgcttaccgcagcagacgacatcgccaacacagaaacgacaatcataccaacatgtttgagtttcataattctccaaaatttatatttaagtagctgaataaagagggttaacaattaagtcattctgttattgcttaaaaacaagaatcattcttgattggttgttgccctgagaatatagtttccagggttattacatttcacgaagaacgataatatctttaaatcacaaggacacctaatcacaacaagtttattgctgcacttgttgaagagagtatttgcaaaaacattttatgtcgctaaataacatgacgatttcattatgcatgttatttataaaccgtgactaaacagaatattattgcgaacaagggaagtgtcaggaaaggtcaagtgctaccaatggttaatatggctataaatcattagctatggttaatgtttgcttgctgaaactaacaccgaattgctctaaacagataagtgcagggtttattaaagctgaccgacagactttcttaacctggtaatatctctcttgggtgactctccaaacatccgcgaatattcccgactgaaatgggatagctttcataaccgacagcataggctgctgtggtgacatcgtaatgttcattcagcatcggtcgcctgacttcattgagacgtagccatttctgataccggagtggactcattcccgcttgatccgtccttaaataagtaacagcaccctctggtgttttcgtatgcagtgtctatgcgacagacactgcgctcttagcatggggcagggaataaccaggctatttctccatgcacaggccaattatgaaagaggagaggcttaagttcttgaaccctgaacgaataacgactaccagaaaagcacttcgcatcactcagacatgatttaacataatatacattatgcgcaccagtataaaccaaggaagaatccagtcgttggcggtcatgattgtcgtgctcattaacaacgaccaaaccccatatctcacttactaccgtattctcggcttaaccgtccatgcaacctcaacacattggtttcaactgccgtcaccacgttctccggaaaatctgtcggtaatgaagtcttcacgttatccagtgctgccggaatcattctggcaaagtcacttaggatttcatgcatctgcacttccgggaatctcagcacctttgctgtcgccaaaaaatgtcgcggataaattttatcgattgccgttttttgcctttggatgcgttaagccccattgccagtttgagatcgctgatgtgtattcccgtaccgccaaggaccggaaatgctgaaatgatgtcgtaaaatggcgtgagtcgataactgccgccagcctgaataaatacggagaagttttttgcatggccatccgttgcgccaatcaaccactggaagacttggaatttcataaaatcataacgatcgcgaagcgcctcgctggaccccatcaaaaacgccatgatccgcgcgatgcctgggcctccatctgattcatatttcacagatgaaggtaaaccgaatgtctgacacatatcctcctgtggcaagcgaagtaaaaccgttcgctcagtattccaacgcctgtcaaaacgttcgaccgctaacgcgcgcacccttcccgctttaatgatttctgcgtccggaacactcaacccaagttctttcgccagcagcagacagtaatactcattatcaacgctttggctgagatcgagcgtcgcattgggctgcctgatttcgccaatcggtaatttaatgatgtgcgtcgtcggcgttattcctttcggaatgcaccagtcattgcctattctaagcagcgctgtcttctcctgcgcgccagcaaccgagatgcgaaagtcattttcttctctaatcatgcccagagggatatctgctttataagccgttaatacttcttcaagcctggcttcagtaagcttttcccatgccattatcgggcgcgttatggtttcattttcgggtaataacgttacggcaccaacgctgtctcgccctatttctgacaataaatcaaacggttgtctggatttagcatgataacgtttaacgatccggtcacgtacaatcgggctatcgggtaacaggttatcgaagaagttaaatacggcatctgaggtgatattccccctctgcaatggcagcgaaagtgacaacggtctggcataacggctggctaaccactccggtgcatacttaaaggtgtgcgcgccgttggctaacttcgttaactcgcctacccgctggttgttcatccaagtgacaagtttaggcattaccactccagatcttgctgttctgttgattctggcgaggcatttttcgtgtcgcatagtgtcattgagagttcaagcgactgtaaaatcttaaaaaatgtcgtgagcgtggtattgtcagggttgttttcgaaattggaaattgtcgcctgcttaatgccaatttttttcgccagctcgctctgcgtccagccattttgctggcgaaccagtttcattgcattcgctaattgcgttgggctatagatcttctgaaagctcatcatgtcatacgtccacagcaaatttatccgcttaaggggatattatcagttttatcctttagtgaggataaagtcaatctggaaacacatcttatccgctgtacgggataaacgctgcgatatccgcgatcgcggataaaagggaggctttaaagcctttgaagtcggcaatattaagccgcatgccatctcgacatgcggcttatacggtttaccagctatatttcactcccagcatgccctgagtatcgctatagcctttatcacctagttgcacaccgacattcccccacaggctaaggttgttatttactttcgcctcaaccccggtacgtacttcaccgagattacgcgcaccttcacggcctacggtttgaccattcatcttcacggcgtagactttgctattgttgatccagttcgcttcaatgtaaggctggaactcacgctgtttaccatcgtcacgctggtgatggctattcaggtaggttttcaccccaagtcgcgtttgcacatttccgtcgccttccgtttcaatgcgcgttccgtctttccgggtatggtcggaatctttcacacccatccaggtgatttgcgcctgtggctggacgtaccaggtattcagcgtcccttcgctgccgctaaatgttcccgcttcaaaggtatacccaccctcaacagaggccgtcacaccgcgagaatcatagtcgtcagcagaacggttatcggaactgacgctgttatcaaaccagttatacagcgcccagctgtcaacataagcgccggtcttattcgcatcgttctgataccaggtcgcgtacagcccagcgctgtaaccgctgatgcgcccatccgatttataacccacacgattactctgagtattactgtgctgattggcgtagcctgccatcacgccaagatgccagcgatcctgcgcgttgctactccactgcgccaaatcgccgcctagctgcaatacatagcggttagcctgagtatttagctgaccgtcaccggcccttgaacgttcgtgccctccgacatgacgcatccacatactgcttgccgacccctgagaatgcagtgaatctgtatactgcggctcacccagacggtcgtgtaaacgatggctaaacagcgagttggctgcggcaatgttgctgatatagcttccggcctccgggcgataaactgatgggccttccggatccacaacagggggattattgatgggatcgggtgtatccgctggcgttacgccgtcccatttactggtcagataccagtttttctcgtcattccccttccctttagccagcgtgtagacgtaagccccagcttcgacagttccggtggtcagcgcgaagttacctgcagaattaccgccaacctcaatgagttcaataccgttgaccgtttgtgcaccgacgccgccaatgttatcaacccgaacgcgagtgttcccttgggtatcgcctttcacgttcatcttatcggtgggcgaattatcgccgcccagcgtcgcgttgaacgtcatcaggccattgtttccggtatagttgccgttaacggtcagtacattccccggtttccccccttcgctattcatttgaaccgtgccgccattctccaggttgccgccgatagtggttttagcgacacgcagtgcccccccaggcataacgttcatatcatctgcagtggtgacatttcccgacatcacaccgctgttatggatattaatgtgttgacttgccatattaatggcagagtcggaaccgaaagcaatttccccccccacgatatccgtcgtaccctgatacgccgcggaatcgttgttaagagtcaggatcccggtacccagttttgtcacatcaccgctaccgctgatactgtgcgtcatcgcccagctacgctcagtggagatggtgagcaggccattattgataacggaagcatcacccaggtttttctgctcgttgacgctgagcgcgctgcctgtatcaatgttgaattgccccacaaagcggctattatcgccatccagctctacatctgtcctggcggttgcgctcacgatacccttcccgcttatgctattgcgcagttcgccagtcacgttttttagcgttaacagaccgtcattggcaatatttcctctgcctaacccctgagtattatcgaggctgacttccgcatttgggctaatgctggttaacgcattgtagcgtgcattaagcccctcgatagccagcgttccccctgtaacattcaggtttccgccacctgtcagttcaccctgactgatcccacctttatttaccgtcagcgccccctctttgaacaaaacagtcgaacccatctgcccggtgaatgtctctaccgtctgcgtcgatccattaagatcgacgatggccgcgttgctgatgttcagttcccgggtgttgccaagtgcaccatccgcatcggtacgtaatgtccccatctgaacgtaggttgccccctgatagtcgttctgaccgttggaaagcgaaacctgtcgcaccgtattgattgccagatccccttcaccaccgatttttgccgacatatcggccgttgcgccataggctccgccatgttcggctaacgtcagcttttgcccaccatggatgttcagcgctttcagcccatagttaacgtacaaaccatcacctggtgcggtcgtgaggcggaatccataatcaccctcggcgaccaccgttccgttttgcgcaatgtgtaacgttttgtccgcttccacctcgtcgccctgtaaatcacgtaacgttaatgagccacccgacccaataaccgtttgcgccttcaccagttgaacgccgacatggctatcgtcgtgttccagcaaattgagcgtcgtcagagggttattcgccatgggatcattccacggtttaggcacgtcgataagcacgtcgcccgtcccgtttacctgatagttacggcctttccaggtgtagtcacccgcgccgacaaccagcgtatcgacgctgatatatccctctgcaagcgtcgcagcaggaatatccgtatcgaaaatgagcgtaccgccattcatggccagtccaccaatggattgctctcccacttttaccgatgtggtattttcactgtcagactgcaacatcgcgtgagtaagcgcagcggtgttgtcgcgttccagagtgaaggtactgtctttcagttgggcaacaccggcgaattcagtccctgttgcatgggtaaagccaaacatcttgtcggaggatgacagctgcactcgcatcaaaccatcgcctttgagcgcattggtcagcgtgtaatctcctgcactgttcgttgatgcgagaatgtcgagcgtaccggggcttgcaatggtgacttcactcgaacccatgcccgttaccccatctgccgtatgagacgcaatggtcaggaggccgtcattgaccagcgttttaccgctataagtattccctgcattgaacaccgtatggcctgcatcatggatcacttttccgtctttatcgtcacccgtaatcagcatatcgacctggtagccggcatcactgttattggtatgattaaagacaaaaacgccttcgccaagaccaaactccactttcgtcgcattggtgataaatccggcatctgccgccgcctcaccgtgagcagcaccaatgtttagcgttcctacagcaggctcaaaaacacctaagtaaacttctccaccttcgacattcagcgtaccgttattcgtcagggttaacgtacccgtaccagatgtccctacgtacatattgaatgtttcaagaagagagttctgcccatccaccctcacgtcgcccttacttttgtcattgagagctatctgtgtatcacgcgctttaactatacctccggtggtaatattcagttcacccgtgcctaatacaccgacctgtagcaattgtgcgttagtagatgatgtctttaaattccagagactgtccgttgaaatattaactatccccttaccggaggcatttcctccgataaatccatagcccgttgaattaagggtggcaccattactgacatttacgataccgctaccaaaattaccgacattgatacccacagtatcgaacgatgatgtcgcatccatcaggttcagtgtgccgataccgcttgctttatcgcccaaaaaagtaatattttgcgatacgaacttaccgccatcgctaatattgaggtttccgacgcccgcaacaccaatggtggtatagacattcttattgacctcccacatcccccccgtggtgatgctgacattcccgacgccggtttctccataaccgagtgagcttcctccgttgctgacaacaagcccctcattactgatatccatttcgccgtggccgtcataaccaagattagttccgagattagtgataacggagttcttatccttaacagtaatgttgcctgtgcctgtttctttcatccccgcagtgataattcccgaatctactttaccttcacgcgagacattaagttcaccgtcgccagcatcaccgatatagatatagcggaaagcttcgcctgttccgaggaaattccaatgccctttatcggtcacgttgatgacaccgtgggaaccgtcctgaacgcccaccaatgaatattctttgttattaatcagtccattattggaaatattgactgtgccatttccgaaatatccattatagagtctgcgtaccgtgatgacagagtcttgctcctgcacattcagggctccgaaaccggtggcattgccaccgataatcgtgttttcagccgtaatcagcccaccctcgcgaatagtcgcttcccccgctccttgattaccaatttgaaattcaattgaggaatcgttattttttattagccactcaccgcccttttcaacgacaacttggccattactgcccgcctgatagcctaaaatggcgactattgaactcgtgacgtaacccttatccgtaatatttaatgagcctgtgccatagctccctatttcgaataattcggtcgtcagaacagagtcctctccctcaacattgaccgtcccgacgcctcctgtcgaggaacctagccttaaatatcctccatcaacgtgacctttctgtttaatattcagcgtccccgttccggattgacccacatttaaaggccttgcattatttccgctatcatacaatcgccaggtgccacccaaaacattaacggtgcccttcgagttctcattaccaccaatgacgctggtagtaatcgtggttaaggaggcattaccgccagccaaaatattaagcactccagtgccataccagccaaccaggtaggcatcataagcaacatcagtatcaatattggtaatctgatcattatcaacttccagactcgcaccagacgctgaaccgcttagtgccagcaaaacacccagcgtcaatctactgaatttcgttgtcagtccagaggatttacgcaaattaaccgtcgattttttacctaccctgcgagttaattccgagcagacctgaaatacctgtagggtgcaattccatatcacgcgatagattctattcatataaacgctccatatacaaacaatacagccacgaaagagatgagtcgccagacattaaaaatgaaacttattaaattgtcagaggtctgtattgagtgttagttggaggtgggaaggtgtcaatttggctaatttgctaatgctttcgaattgatagattaaaaattgcatagttcttattttatttaaaaatgaactatgagttattgttgcttaataagaaaactgtttctttcaataagaaaattatcatcatcatatttaacaaagaatagcactaattgctaaaaatcgaagtttattaaaccccttttgcatccattagtgtctttaggaatattcgttataaaataagcattatgcttaatgctttaagaaaaatagcaatttccccttgaatatattactggtgatggaaggatgaatctgcaagctggcatttaacaagccagttctaaaagaagggaaataagaataactatactcaaaaactaacagccacggtcatcatgatgtggctgtcaatgaaactataacccaggcgctttccataacgacgtcgtcagtccatgatcaaccagccccagctgatcctgataaactgcctgccacttatcgcgtgaatcctgataaagttcatgcttttccgggtctggtgtgtgcgtccgttcccagcgaaccaggcgttctccggtttctgccattgatgaaaaaattccggcaccgacgccagctgcaatggcacatcctaatgcagtggcttctttgaccaccggaatattgacgggtaatcccgagacatcagcgagaatttgactccataatttcccttttgaacctccgcctgcaaagactaacgatgaaggatgaatattcgagaaatcagcaatttgctgcaagttacacgctgatacaatcgccgcattttcttccagcgcacggaacaatgtcgctttgttacatttatccgggtcaatggacaagttaataaaggaaggcgcagcgtgataccaggttttaaagcgcattctgtcggagaatatcggcattacgccccacgacccaggcggcacccggctggccatctcttccaacagcgtataggtgtcgatgcctagacgttcggcaatcagtttttcttcggcacagaaagcatcgcggaaccagcgcatggtgagtccggtaaaaaagcttatagattcagcttgtaccatgccaggaataacatggggattaacgcgcacgttcatttctggatcggtcaccggcgcggctaagtttacaacttgctgccagaatgtgccgccaagaacagcggtttgtgccggacgcacaacgcctaaccccaggcaaccaagctgcacgtcacctcctccaacgaccaccggagtgcccgccttcagaccgcagagttccgccgcttgtgaactcaccacacccagcaatgtgccggtttctttgacaggagaaagaatatcggcacgcaggccagccatatccagcaatgcaggtttccagtcacgggtggttagatcaagaagtcccgtggtgccagcgttagagggatccaccgcaagttcgccgctgagcatataggccagccagtcgctgatcatggtgatggttgatgcctgacggtaaatatcggaacgatggtgcgccagccaaagtaatctggggatggcacttaaagccagtgtttgtccggtcgcgcgataaacttcgttttcaaaggtattgttgtgcagttctttaagttcgctaacttcgcgcgccgctctggcatccacattggcgcaggcccagatcggtgttccttcattgttatataaaacaatgccttcacgcatcgaacatgccgaaacggcagcgatatactccggggctatgccggcgttgtgcaacgcctggcgcatacactcacacgccagttgccagtttttgttgagatcaaattccatagaaccaggaacgtccggtactgccagatgccgccactccgcctgtcccactgctatttgattgccttccaggtcgaatatcacagcccgaatacttccggtgcctgcatccagcgccatcaggtagtactttgattctgaaggggtaaagagtcgagccattagattatcctcggcttatgcgttctgtctgttcctctatacgttctccatcattcccggtaataaggtcatgcaaatttaactacgtaaaatcgccgctgctgtgtcctgatcggtaaccagtgcgttgatataaccgcctttcattgcagcggcaattgcttcggctttattttctccccctgccacgccaacccggacgggtatggtcttcagcgcgcttaaaggtaagccaatcagttcgttatgtattttgatatccgtgacaacgtcacctttcgcatcaaaaaagtagcctaaaatgtcgccaaccgccccttttcggccaatcattaactgttcgccttggctgatataaccggagcgaatgattgtcgcgtcgtcttgttgactcacggccccaatgccgacaatcgccacatccgctgcttgcgcggctaacagaacatctttgacgcaattttcattttttagcgtacgagcaatgtcagcggaggatgcccgcaacggggccggaataatattcacactgcacgccgcgttaagctgtccgatacccgtcatataagaaccgacgccaccggagagcgtgaccaggcgaatttgctgtgacgaaataaaaccacttaagcgttgcagcgtattcatggttgcctcgccaaaaccaatcgccagcatctgttgtggttgaagtaaactcatcaacatatgcgccgcgcctatccctagtcgcccgccgacatcagcatccgcaagccctgggatcacccggacatgttgcagcgaaaactgacgacgtaattgtgtttcatattccagacagccttcaaagcgagaattaatctgtacgcgaataatgccggattgatgccctttctccagtaatcgcgacactttcaaacgggtcaggccgagacgatcgctgatctcactctgggtcagcccgtcgtgatagtaaaaccacgcgatccgcgcgacctgttcttcttcacacattccctgttctgaaattaccgaatcgttgattgtcataattcattcttcactttgaacatacttaaatctttaatgcaattgttcagttcttgcgcatttatatctgtgatggcaaccacagtttgactctacgagcatgaacaaacgcaaccgtgaaaatcaaaatagcataaattgtgatctattcgtcggaaatatgtgcaatgtccacctaaggttatgaacaaattaaaagcagaaatacatttgttcaaaactcacctgcaaaactgaacgggggaaatatgcaaacgagtgatacccgcgccttaccgctactttgcgcccgctcggtttataaacagtattcaggggttaatgtcctgaaaggcatcgattttacgttgcatcagggggaggtccacgccctgctcggcggcaatggtgccggtaaatcgacgttaatgaagattattgccggtattacccctgctgatagcggtacgctggagattgggggcaataattacaccagattaacgccagttcatgctcatcagttgggcatttatctcgttccccaggaaccgctgctttttccaagcctgtcgataaaagaaaacattctgtttgggctggcaaaaaaacaactctccatacagaaaatgaataacttgctggcggcgctgggctgccagtttgatctgcatagtctggcaggatcgctggatgttgccgatcgccaaatggtggaaatcctccgcggcctgatgcgcgactcgcggattctgatcctcgatgaacctacagcctcgcttacccctgccgaaaccgaacgcttgtttcgtcgcttgcaagagctgcttgctactggcgtgggtattgtttttatctcgcataagctgccggaaattcgccagattgccgatcgaattagcgtgatgcgcgacggaaccatcgccttaagcggcaaaaccagcgaactgtctaccgatgacattattcaggccattacgccagcgatacgggaaaaatcgctctctgccagccaaaaattatggctggaattacctggcaaccgcccacaacatgccgccggaacgccggtgctgacactggaatatctgaccggcgaaggtttcaggaatgtcagcctgacgctcaatgccggagaaattctgggcctggctgggctggtgggagccggacgcacagaactggccgagacgctctatggtctgcgtactttgcgtggcggaagcattatgctgaatggtaaagagatcaatagattatccaccggagaacgtttactgcgcggtctggtttatctgccggaagatcgccagtcatccggactgaatctcgatgcttcactggcgtggaacgtctgcgcccttactcataaccttcgtggattctgggcgaaaaccgcgaaagataatgccaccctggaacgatatcgtcgggcgctgaatattaaatttaaccaaccggaacaagctgcacggacattatccggtggcaaccagcaaaaaatcctgattgccaaatgcctggaagcctcgccgcaagtattgattgtcgatgagccgacgcgcggcgtggatgtctcggcgcgtaatgatatctaccaactgttgcgcagcatcgccgcacagaatgtggctgtgctgcttatctcctctgatctcgaagagatcgaactgatggcagatcgtgtgtatgtgatgcatcagggcgaaattacccactctgcactgaccgggcgcgatattaatgtcgagaccattatgcgcgttgccttcggcgatagtcagcgtcaggaggcgtcatgctgaagtttattcagaacaaccgtgaaatcacggcactgctggcggtggtgctgctgtttgtattacccggttttctcgaccgccagtatttaagtgtgcaaacgctgaccatggtttatagcagcgcgcaaatcctgatcctgctggcaatgggcgcgacgctggtaatgcttacgcgcaatattgatgtttcagtgggttcgattaccggaatgtgcgcggtgctgttggggatgttactgaacgcggggtattcactacctgttgcttgtgtcgcgactttactgcttggtttgctcgcgggatttttcaacggtgtcctggtcgcgtggctaaagatccctgccattgttgccactcttggcacgttagggttgtacagaggcatcatgttgctgtggactggcggtaaatggattgagggattacccgccgaactgaaacaactctccgccccgctgctgtttggcgtttccgcgattggttggttgacgataattctggtggcatttatggcctggctgctggcaaagacggcgtttggacgcagtttttatgccacgggcgataatttacagggcgctcgtcaactgggcgtccgtacggaagccattcgcattgtggctttttcgttgaacggttgcatggcggcactggcgggaattgtgtttgcttcgcagattggttttatccccaaccagaccggtaccgggctggagatgaaagcaattgcagcctgcgtgctgggcggcattagtttgctcggcggttccggtgcgatcatcggtgcggtactcggcgcatggttcctgacgcagatcgatagcgtactggtgctgttgcgcattccggcatggtggaacgattttatcgcgggcctcgtgctgctagcggtgctggtgtttgatggacgcctgcgttgtgcactggaacgtaatctgcggcggcaaaaatatgcccgctttatgacgccaccgccatccgttaaacccgcttcgtcaggtaaaaaacgggaggccgcataatgcgtattcgctacggttgggaactggctcttgccgcactgctcgttattgagattgtcgcatttggtgcaattaacccgcggatgttagatctcaatatgttgctgttcagcaccagtgactttatctgcattggcattgtcgccctaccgctgacgatggtgattgtcagtggcgggatcgatatttcgtttggttcgaccatcggcctctgcgccattgcattgggcgtactgtttcaaagtggtgtgccgatgccgctggcgatactcctgaccttactgctcggcgcattgtgcgggctgatcaacgccggattaattatctataccaaagttaacccgctggtgattacgcttggcacgctgtatctgtttgctggaagcgctctgctgctttccgggatggccggagcgacggggtacgaaggtattggtggattcccgatggcgtttacagatttcgctaacctggatgtgctgggactccccgttccgctgattatcttcctgatatgtctcctcgttttctggctctggctgcataaaacccatgccggacgtaatgtgtttttgattgggcaaagcccgcgcgtggcgctttatagcgcgattccagttaaccgcaccttatgtgcgctctatgccatgacggggctggcgtctgcggtcgccgctgtgctgctggtatcgtattttggttcagcacgttccgatctcggtgcgtcgtttctgatgcccgccatcaccgccgtggtgcttggcggtgccaatatttatggtggttccggttccattatcggcaccgccattgcggttttattagtgggatatttgcaacaaggtttgcaaatggcaggagtgccaaatcaggtgtccagcgccctttccggtgcgctacttatcgtcgttgtcgtaggtcgttccgttagcctgcatcgccagcaaattaaagagtggctggcgcgtcgggccaataacccattgccataaaggatatcttcatgacacttcatcgctttaagaaaatcgccttacttagcgctcttggcattgccgcaatctctatgaatgtgcaggccgcagagcgtattgcatttattcccaaactggttggcgtgggattttttaccagcggtggcaacggcgcacaacaagcgggtaaagagctgggcgttgatgtgacctacgacgggccgacagaacccagtgtttctggtcaggtacagttgattaataacttcgtcaatcaaggttataacgccattatcgtttctgcggtttcgcctgatggcttgtgtccggcactgaaacgcgccatgcaacgtggtgtgagagtgctgacctgggactctgatactaaaccggagtgccgctcttactacattaatcagggaacgcccgcccagttgggaggtatattggtggatatggcggcgcgtcaggtgaataaagacaaagccaaagtcgcgtttttctactcaagccccaccgttacggaccaaaaccagtgggtgaaagaagcgaaagcgaaaatcgccaaagagcatcctggctgggaaattgtcactacgcagtttggctataacgatgccactaaatcattacaaaccgcagaaggaatattaaaagcgtatagcgatctcgacgccattatcgcccccgacgccaacgccctgcccgctgccgcacaagccgcagaaaacctgaaaaatgacaaagttgcgattgtcggattcagtacgccaaacgtgatgcgtccatatgtggaacgcggcacggtgaaagaatttggcctgtgggatgtggttcagcaaggcaaaatttcagtgtatgtcgcggatgcattattgaaaaaaggatcaatgaaaacgggcgacaagctggatatccagggcgtaggtcaggtggaagtctcgccaaacagcgttcagggctatgactacgaagcggatggtaatggcatcgtactgttaccggagcgcgtgatattcaacaaagagaatatcggcaaatacgatttctgatgtgcattacttaaccggagtaagttatggcagatttagacgatattaaagatggtaaagattttcgtaccgatcaaccgcaacaaaatatcccttttatcctgaaaggttgcggtgcgctggattggggaatgcagtcacgcttatcgcggatatttaatccgaaaacgggtaaaaccgtgatgctggcctttgaccatggttattttcaggggccgactaccggacttgaacgcattgatataaatatcgccccgctgtttgaacatgccgatgtattaatgtgtacgcgcggcattttgcgcagcgtagttcccccggcgaccaataagccggtggtactgcgggcgtcaggtgcgaactctattctggcggaattaagtaatgaagccgtggcgttatcgatggatgatgccgtgcgcctgaacagttgcgcggtggcggcgcaggtttatatcggcagcgaatatgaacatcagtcgatcaaaaatattattcagctggttgatgccggaatgaaagtgggaatgccgaccatggccgtgactggcgtgggcaaagatatggtgcgcgatcagcgttatttctcgctcgcgactcgaatcgccgctgaaatgggggcgcaaattatcaaaacctattatgtcgaaaaaggttttgaacggattgttgccggatgtccggtacccattgttattgctggcggtaaaaaattaccggagcgcgaggcgctggaaatgtgctggcaggctatcgatcagggcgcttctggtgtggatatggggcgtaatattttccagtctgaccatccggtggcgatgatgaaagccgtacaggcggtggttcaccataacgaaacggctgatcgggcatatgaactctatctgagtgaaaaacagtaactgcggatttaaggagaagaattatgcacgtcacactggttgaaattaacgttcatgaagacaaggttgacgaatttatcgaagtttttcgccagaaccacctgggctctgtacaggaagaaggtaatttgcgcttcgatgtcttacaggacccggaagtgaattcgcgcttttatatttacgaagcctataaagatgaagacgcagtggcattccataaaaccacgcctcactacaaaacctgtgtcgcgaaactggaatctttaatgaccgggccgcgtaaaaaacgtctgttcaatgggttgatgccgtgaggcgaattcatcagttttatctacaattggggtaacgcgctgacgggagtaaataaatgtctgactggaacccctctttatatctgcactttgccgctgaacgatcgcgtccggcggtggagctgcttgccagagtaccgctggagaatatcgaatacgttgccgatcttggctgtggcccaggtaacagcaccgcccttctaaaccaacgttggcctgctgccaggataacaggcatcgactcgtctccggcgatgattgctgaagcgcgcagtgctttgccagactgccagttcgtggaagcagacatccgcaactggcaaccggaacaggcactcgatctgatttttgctaatgcctcactgcaatggctgcccgaccactacgaattgtttcctcacttggtttctttacttaatccgcagggcgtgctggcagtacagatgccagataactggctggagccgactcatgtgctcatgcgcgaagttgcctgggaacaaaactacccggatcgcgggcgtgagtcgttggctggcattcatgcttactacgatattttgagcgaagccggatgtgaggtcgatatctggcgaaccacttactatcaccagatgccgtcgcaccaggcgattatcgattgggtgaccgccactggattacgtccgtggttacaggatctggccgagagcgaacagcagctttttcttacgcgctaccatcagatgctggaagagcagtatccactgcaagagaacggacagatactgctggcatttccgcgtctgtttattgttgcccgccgtacggagtaattatcacgtcagctggtaatgacgatcgggaagaatttttgctggaatttcggcttcatcgttcatctgtaacaggtcaatttcaatagcgttgcagatggcatccagcggtaaatcattgttttcagtaccgaacggatcttccaattcttccgccagacaatccagcgaaataaaagtgtaggaaatcagcacagagataaaaggcgtcatgtaatgcaggtccacgaccagcgcgaacggcagcatgatacaaaacagataaacggtacgatgcaaaatcagggtgtaggcaaagggaattggcgtgtaggcaatgcgctcacagcctgccagaaccgctgaaatatcattaagccgatcgttgaggctaataaacaggatatctgaaagctgcccattgcggcgctgaaccgccaaccactcccccattattaacaagatacggttagctggagagttcgaagccagtacaggctgaagatcttcagtcttgagataatgagccagcacttccgcctgtggctgtttgcgtaatgtcatgcgtaaacagtgggcgaaggcgatttgcaaccgggcaaactcccttacacttgccgaatccggcaatgtcgtttttacctcgcgcagtaacgaccgtgaggcaatcatcaactgcccccaaagttttcgcgcttcaacgtaacgggcgtacccggcattattacgaaaaccaagaaaaatggcgatggcgacaccgagaatgctgaacggtgcgagggtgaatttgatgcccagatgcgtgtaccagggcagcatgaaaataacagcgatagaaaagagaaaattgagtagtaagcgcgatgatatcttggataatactgagccgtgccagacaaaaatacggcgcagccagtgttgttgtggacgaacaatcatggttatcttcaggcgtgaaaaagtcgccctattaaacgtgattacgatcacattctcaagacgctacttacaaattacctacaagcttacaacattaacaggcgctgcatgtggcatctgttaatgataaaggcacataggatgttgtaactaatatagtgaaataagaaacccggtcgaaaccgggttcagaagtaacggtgttattagcacaacggacgtacagcttcgcgcatccctttttcaagaatcgcatccaggtcattagcaacctgctcgaccagaccaggcacttgcgtcaggtcctgctcccagtggtctttttctgccaaaacaatcgctaccagttcctgggtgccgataacacggtcacgatgctggctccagagttgctgataacgttccagccagtgtgcatcgtcctgtaccggatatgtttctccgttacgctcaccgcgatagaaggcaatcaaagccgctaatgcgaaagtaaggcgcgccggaagtgtgccttttgccttctgccctgccagcagctgcggcaggatgcgagtgcggaacttggtcataccgttgagcgcgatagacagcagctgatgcttaatgtacgggttacggaaacgcccggtgactgcactggcgaaagattccagttcatcacgaggcaaatccagtaccggaataatttcttcgtagatagctttttcaacgaatgcgcaaatttcagcatcgttcatcgcttcacctacggtatccagccctgcctggaacgccaccggcaccagcgcggtgtgcgcaccgttgaggattgccactttgcgttctttgtacggtttaatatcgtcaacaatcagcacgttgagcggatatttgtccagacgcagttcagtcgctaaggatttcggtccctgaatcacaaacaggtaaaagtgttcagcggtgtcgagaaaaccatcgtgataacccagttcttcttccagtttagccacttcatcgcgcggataaccggtaacgatacggtccaccagcgtagaacagaagctgttagcctgatccagccattgaataaatgcttctggcagtgcccactcttgcgcatagcgcagcaccagttcacgcaacgcgtcgccattgtagtcaatcaactcacacggaatgatgatccaacctttatccagcgcaccgttgaaatggctaaagcgttcgaacagcagacgggtcagttttgccggatagcttaccgctggcgcgtcatcgaatttatcgcccgcatggtagctgatacccgcttcggtggtgttagagaaaacaaagcgcatttccgggttgtgcgccagtttcaggaattcatcgtattcactgtagacgctgatttcacgattaaccgagcgaatcagacgcgcgtcgctgaccgcttcccccttctcattcaggccacggataatggtggtgtacagaccatcctgcgtgctcagtgacggcgggaatgaagtttcaatcggacgaacaacgaccacaccagaattcagatcggtgtgctcattcaggagatcgatttgccagtcaacaaaggcgcgcaggaagttaccttcaccaaactgaatgatacgttctggatactgtgcaccgggaaaatcgcgacgatttagtgttttcacaatgggttcccttctgattagtcatacaacctgtttgaattggtacgacaggttagcaaactttaatacgccgaacccctgttttgatcaactcctgatgattaatgagcagttttatgagaaaagtgtggcgcggatcatggtttaatcgaggaaatacgccttttcctggatcataaagtggtagaacacattgcattcaaatcgcgcggaatgaataaagatgtcagacaacttcctcaccgtaacgcatagtgctggtacggttgcgcccatctttcttcgagcgatacagacacgtatcggcttcgaccatcaatttattaaaatcatcggtcagcgttcggtacgatgcgcgaccactaccgacgccaatacttaccgtgagataaagcgttttttgttgccaggtgaatggttgcagttcaacgcctttacggattttttccgccattagcagaccatcgacaggattcaccgacggcactgcaacagcaaattcttcgccgcccatgcgcgccaccagccccttatcaccgacaatcttctgaatatgccgggcaaacacgcttaacactttatcgccacattcatgtccatagttatcgttaatgcttttgaaatagtcgatatcaagcagcatgaccgtcagatgttgtgtctgtttcagcgatggacttttcagcgcctcataaagaccggaccgtgagtaaacctgagtcagaaaatcaaagtcggctcgcagcgcaacttgcttcattagcgaattgatcgctgccacgctaaaagaaaccataattgggcatatcgccatcgtggcaataccgagacgtgcggagaacatttccggaatggagaacggcgaaccgaccgagatatcaatcaccgaatttgccaccagtacgatttccaccgcaccggtgacaaaggtcaacagacatgttacctgcggcgtatagcgcactgcacaccagattaatgcaggcagcgggaacgccagactccccgctccgccaatgactaccgaggcaataaccgacacaataagcgcgatggcgggcatcatctgttctgctttaaagcgcggcagcactccaggaatagccaacgtcagcatacaaggcacgatcaaaacgcccgttgagaattgctcactgaaccagtccgcaagcaaaggccagaaatccagactatcaatactgaccgaaccaatcgccccgacaatagcgcataataatgcggcaatcagacagtaattaaatagccgtaaggcacttactggctcatacttatttttccccagacgcttatcccgcacgaccagtaaggcgacggtaacaataaacatcatattggagaaattgataaccagtgaaaccagtccccattcggtggttatggcatcataaaccagcatcgccacataactgatcgcatagtaatgcagtcgattaagccagacatagcgggcaaacacccccgccattacgccattcagcggccagaaaagagaaagttcgtgaaccagccgtaactctgcaccaataaaatagaacagcgtggttagcgcaaaaatagcgatgctattacgtagcagatgaccttcctggaacaaacggaaagttgaaatggggtgtacatgcattaattatctgtccatacaattgcgggtggcaattatctcaacgtaataagtaaattctcataaaggatagcatgttcgctaacagcggcggcaaataaaggtaccctgggaatgctattttatcgttttccgcaattctcatggctgattcatctgtacaaccagccagtgatagattaccgccacgatataacgttgttgttcttcgcttaacgaaacaccctgcggaatgttatgccacttagccagacaaccgcgacagcaggtcgcggtggcgtgctgagcgataaacaccggatgcccgcgcatgggggtttgcttaccgtcattagccggtaatgccggagcaagacgtttagcgacaaaatccgccgcatgttgttcgatgactggcgcgcctttctccaggcaatactgacgctctttcatgcccagacgaaagcgagagcgaaattttgaacgggataaacgcgcgaagagtggatcgagagactgcattaataaaccgaacgccctaactgtttcgtcaattgttcaaggacggcaatacccgcaagcgagttacctgcatcatccagttccggactccagacagcgatggccatttcatgcggaacaatcgccacaataccgccaccaacgccagatttcgccggtagccccacccgccaggcaaactcccccgcgttctggtacataccactggtcgccatcagcgcgttaatttgccgcgcctgcattggcgtcaccacaggttcatcaatatgaatagctttcccctgattagccagaaagacaaacgtccgggccagctctacacagctcattttcagagcgcagtaatgaaagtagttttgcagaacggttgtcacatcatgatggaaattgccaaacgacttcatcagccaggcgatagccgcatttcgcgcggaatgttcaaattcggaacgcgctaccaccgtatcgtatgaaatatcagacacaccgcttaagccgcgcacgacttccagcatacgttgccgtggtgcgcttaatcgcccttgcaacatatcgcaaaccaccagcgcaccagcattaataaacggattacgcggaataccctgctccatttccagttgcactaaagaattgaacggtgatccagacggatctttgccgacgcgttgccagatttcctcttcggagtaatgacgcatggcgacaacgagactcagcactttggaaatagactgaatggaaaaacgttcttgcgcgtctccggcctgaaaaagctgtccgtcaacggtacagatagcaatgcccaatcgggaaccgtctactgtagccagcgccggaatataatccgcgactttaccctgaccaatgagcggccgcacttgccgcaagatgttttctaaaattgcattatccatggcgactgccactttctactcctggaccgcaggtctgaaaagacctgcgagtatatcagagctgaatatgtcgcgtcagatccggtctttccacaccgtctggatattacagaattcgtgtaagccgaaatgggaaagctcacgaccaaagccactctttttcacgccaccaaaggccactcgcgcgtcgctggcacaataaccattgataaacaccccaccgcattccagacgtgccgccatctgtctggcctgtgtttcgtcggtggtaaaaatggtcgctgaaaggccgaactcactatcattagccagttccagcgcatgttctgcatctttcgcaacggtgattgccgcaacagggccaaacatttcttcccgaaacgcggtcatttctggggtaacattcgccagaaccgttggcggatagtagttacctgccccagccatcttttccccgcccagtaacaaacgcgcaccctgcgccagggttttctccacctgatgatgcagctcatcacgtaaatcaaaacgagccattggtccgagagcgttctcttcatcacggggatcgcccattttcaaggctgccgcagctgccacaaaacgttcggtaaatgcagaagcaattccctcttcgataataaagcgttttgccgctgcacaaacctgtccggtattctgataacgtccggctaccgccgctttaaccgccagttccagatcggcatcgttaagcacaataaatggatccgaaccgcccagttccagtacgcattttttcagtgccgctccagcctgtgcgccaatagccgctcccgcacgaacacttccggtcaccgtgacagcagcaatgcgcgaatctttaatcatttgactgacaccgtcgttgtcggcatttagccagccatatacgccttgcgggattcccgcatctttaaacacctgggcaatgagctgagcacagcccatcacattcggcgcatgtttaagtaagtagccgttacctgcaagaatgatgggaaccgcgccacgcatcacctgccataacggaaagttccacggcataatcgccagaatcgtccccaacggtcgatactcaataactgcctgctgattttccaccagcgtaggttccgccttcagcattgccggaccatgttctgcataccagtcacacaaattcgccgatttcgccacttcagcgcgcgcctgattgattggtttgcccatttcacgggtgatcatttgcgccatttcttcgctacgggcgcgcagagccttaccgataccacgcagtttttcagcacgataatctatatttgtctcgcgccagtcgcgaaagcctgctgccgccagctgaagtgcgttttcgatatcgttagcgccagcccaaggcagcacagaaagttgttcacccgtggcaggatttattgaaattgcatgagttgccggagtaatggtcatcggggtatctcctttatgagtcatggtatgaagatacgcagatttactcttgctttaaaatgaataatattaagccacttattcacgaatcgagaatgttatggatctgacccaactggagatgttcaacgcggttgccgaagctggcagcattacccaggctgcagcaaaagtgcatcgcgtaccgtcgaatctcactacccgtctacgccagctggaaacagaactgggggtagatctgtttattcgcgagaatcagcgtttacgtctctctcctgccgggcataactttttacgctatagccaacaaattctcgcgttagtggatgaagcgcggagcgttgtcgctggcgatgagccgcaaggtttattttctcttggttcgctggaaagcaccgcagcagtgcgcattccggccacgctggcggaattcaaccatcgttatcccaaaattcagttttcactttccaccggcccttccggcactatgctggaaggagtgctggagggaaaactgaatgcggcatttattgatgggcccattaaccatactgccattgacgggataccggtataccgcgaggagctgatgatcgtcacgccacaaggtcatgcgccagtaatccgcgccagtcaggttaacggcagtaacatttatgccttccgcgccaattgttcgtatcgtcgccacttcgagagctggtttcatgctgacggtgccgctccgggaactattcacgagatggagtcgtatcacgggatgttggcctgtgtggtcgcaggagcaggcattgcgcttattccacgctctatgctggaaagtatgccggggcatcaccaggttgaagcgtggccgttagctgagcaatggcgttggttaacaacctggctggtctggcgtcgtggtgcgaaaacgcgtccgcttgaggcatttattcaactactggatgtgcctgactcggcaaaacagggttaccaatgagctatttttgatagttcttgcagctcaaatgccctatatagtgatgttccgatgacttatgactatatggggcaaatatggttacgccagtaagcatcagcaattacatatctcttcctgatgattttcccgttcgtaatattgcaccacaggtaaaagaagttttaaaggactttattgatgcgccaagtacaataatatgtgatgaagagtggcgcacgtctttaaacatcaactcagccacaaaaaagatatttaataaccttgataacttatcatatattcagaggacttcttttcggggtaacgacacgctatacaatgaaaaggttcagtttaaactcacttatcccgtcaagaatggaagacacaaagaaaatattgaatttcaggtagtaataaatttaagccctatttatttagataattttcgccatgatggagaaattaatatttttgcgctcccaacccaaagcctgtcactatggggcgcgtatttcagaccggcgtcgagcgtgtgctatttctgtttctgaatgattttattgaacaatttccaatgatcaaccctggcgttcccatcaaaagagcgcatacaccacatattgaacccctgcctccggatcgccataccgctgcagattacttacgccagtttgatttgcttgtcctgaattttatctctcgcggtaattttgtcatactcccccgattatggagtaactctgaggttcacagatggttcgtcaataaagatcctaacttgatcaccgccattctcgacataacagacggcgaattaaaagaggatttattgcaaagcctgatggattcattaggttctaacaaacatgtactacccgaagtctgcatctgctttttatcccttttagcagaacaagaatctcctcattttcaggacttttttattttcgccaatatgttattgcactatcaccaatttatgaatcccaatgaaagtgatctgaatgacgtgttgatgccagcatcattaagtgatgataaaattatcaaacatatggcgcgcaggaccctcaaactgtttgtaaaaaatgaaacgccgccaaaagttactcacgaagacctggtgaaaaacaggcctcgctcccctgtcagaccacctatacccgcaaccgccaaaacgccagacctccctgaacgtcattaaaccgtgatgttaccgactctctgacgcggaacagaatcagcgtcagagaaacggaaaacgcgatccagatcacaaatgcattgtattcacatcattaaccgttttaagatcatttcatcactttttcgcaactcacccgataatctgttatgacaacaaacactgtttcccgcaaagtggcgtggctacgggtcgttacgctggcagtcgccgccttcatcttcaacaccaccgaatttgtccctgttggcctgctctctgacattgcgcaaagttttcacatgcaaaccgctcaagtcggcattatgttgaccatttatgcatgggtagtggcgctaatgtcattgccttttatgttaatgaccagccaggttgaacggcgcaaattactgatctgcctgtttgtggtgtttattgccagccatgtactgtcgtttttatcgtggagctttaccgttctggtgatcagtcgcattggtgtggcttttgcgcatgcaattttctggtcgattacggcgtctctggcgatccgtatggctccggccgggaagcgagcacaggcattgagtttaattgccaccggtacagcactggcgatggtcttaggtttacctctcgggcgcattgtgggccagtatttcggttggcgaatgaccttcttcgcgattggtattggggcgcttatcacccttttgtgcctgattaagttacttcccttactgcccagtgagcattccggttcattgaaaagcctcccgctattgttccgccgcccggcattgatgagcatttatttgttaactgtggtggttgtcaccgcccattacacggcatacagctatatcgagccttttgtacaaaacattgcgggattcagcgccaactttgccacggcattactgttattactcggtggtgcgggcattattggcagcgtgattttcggtaaactgggtaatcagtatgcgtctgcgttggtgagtacggcgattgcgctgttgctggtgtgcctggcattgctgttacctgcggcgaacagtgaaatacacctcggggtgctgagtattttctgggggatcgcgatgatgatcatcgggcttggtatgcaggttaaagtgctggcgctggcaccagatgctaccgacgtcgcgatggcgctattctccggcatatttaatattggaatcggggcgggtgcgttggtaggtaatcaggtgagtttgcactggtcaatgtcgatgattggttatgtgggcgcggtgcctgcttttgccgcgttaatttggtcaatcattatatttcgccgctggccagtgacactcgaagaacagacgcaatagttgaaaggcccattcgggccttttttaatggtacgttttaatgatttccaggatgccgttaataataaactgcacacccatacataccagcaggaatcccatcagacgggagatcgcttcaatgccacccttgcccaccagccgcataattgcgccggagctgcgtaggcttccccacaaaataaccgcaaccaggaaaaagatcagcggcggcgcaaccatcagtacccaatcagcgaaggttgaactctgacgcactgtggacgccgagctaataatcatcgctatggttcccggaccagcggtacttggcattgctagcggcacaaaggcaatattggcactgggttcatcttccagctcttccgacttgcttttcgcctccggtgaatcaatcgctttctgttgcggaaagagcatccgaaaaccgataaacgcgacgattaagccgcctgcaattcgcagaccgggaatcgaaatgccaaatgtatccatcaccagttgcccggcgtaatacgccaccatcatgatggcaaatacgtacaccgaggccatcaacgactgacgattacgttcggcactgttcatgttgcctgccaggccaagaaataacgcgacagttgttaatgggttagctaacggcagtaacaccaccagccccaggccaattgctttaaacaaatctaacattggtggttgttatcctgtgtatctgggttatcagcgaaaagtataaggggtaaacaaggataaagtgtcactctttagctaaccttgcatcgcattgaccaaaacttgaaccgatttagcaaaacgtggcatcggtcaattcatttatttgacttatacttgcctgggcaatattatcccctgcaactaattacttgccagggcaactaatgtgaaaagtaccagcgatctgttcaatgaaattattccattgggtcgcttaatccatatggttaatcagaagaaagatcgtctgcttaacgagtatctgtctccgctggatattaccgcggcacagtttaaggtgctctgctctatccgctgcgcggcgtgtattactccggttgaactgaaaaaagtgttgtctgtcgaccttggagcactgacccgtatgctggatcgcctggtctgtaaaggctgggttgaaaggttgccgaacccgaatgataagcgcggcgtactggtaaaacttaccaccagcggcgcggcaatatgcgaacaatgccatcaattagttggccaggacctgcatcaagaattaacaaaaaacctgacggcggacgaagtggcaacacttgagcatttgcttaagaaagtcctgccgtaaacaaaaaagaggtatgacgatgtccagacgcaatactgacgctattaccattcatagcattttggactggatcgaggacaacctggaatcgccactgtcactggagaaagtgtcagagcgttcaggttactctaaatggcacctgcaacggatgtttaaaaaagaaaccggtcattcattaggtcaatacatccgcagccgtaagatgacggaaatcgcgcaaaagctgaaggaaagtaacgagccgatactctatctggcagaacgatatggcttcgagtcgcaacaaactctgacccgaaccttcaaaaattactttgatgttccgccgcataaataccggatgaccaatatgcagggcgaatcgcgctttttacatccattaaatcattacaacagctagttgataacgtgacaacgtcactgaggcaatcatgaaaccactttcatccgcaatagcagctgcgcttattctcttttccgcgcagggcgttgcggaacaaaccacgcagccagttgttacttcttgtgccaatgtcgtggttgttcccccatcgcaggaacaaccaccgtttgatttaaatcacatgggtactggcagtgataagtcggatgcgctcggcgtgccctattataatcaacacgctatgtagttattgtcaggctctgatcacagagcctgacatctccgtaatatcttcctcaagtctcaaatattttcgccattgttggcgatgagatcccgataccagtaaaacgacgctttacgtatccgttccagcgttcccttcccttcgttgtctttatcgacataaatcattccgtagcgctttttcatttcccctgttccggcagaaaccaggtcaatgcagccccacggggtgtagccaattaagtcaacaccatcttcaactacggcttttttcatttcccgaatatgggaagcaaagtaatcaatgcgatagtgatcgttcaccgtgccgtcagcttgtctctggtcaaccgcaccaaatccattttcgacaataaacagcggcaactggaaatgatcccagaaccagttgagtgaataacgtagccctgccggatcaatttgccatccccattcggatgtatcgatataagggttgctgaccaaatctcgtggttcaacataatccagttgcgggttatcgggcgaaaattgtgtcgtaaaagacatgtagtagctaaagccgataaagtcgacacaaccactggcaagaatcgcgttatcttctggtgtgatatcgaggttgaatcctttcctggcaaagtaattcagcatatgttgcggataatatccacgagcatgaacatcagtaaaccagtaacgacgatgcattgctttcgtggccatcatcatatcgttgggtgcacacgtcagaggatagatgggacacatggcgatcatacagccaatgttaaattcaggattgatcgattttccagtctgtaccgccagggcactggcaactaactcgtaatgtaccgcctggtacattatttgttcgcgctcattgatatcttcctctggcgaatacaagataccggaattagtaaatggacacaggctttcgctgaaattcacctgattattgatttcgttaaacgtcatccagtactttactttttctttatagcgcgtgaagaccgttgatgcgaagcggataaaaaagtcgatcagtttacggtttcgccagccaccatattttgtcaccagatgataaggcatctcaaaatgtgaaagcgtcaccacaggttccattccctgcttaaggcattcatcgaacagatcatcataaaattgtaaaccctcttcattcggctcctgttcgtcaccttgcggaaagattcgtgtccaggcaatggaagttcgaaagcatttgaatcccatctcggcaaataactgaatatctgttttatagcgatgataaaaatcaattgcttcatgattgggataattaagcccgtcgataacgccttctgtcacttcacgcggcaccccgtgagcgccagcagtcatcacatcagcgatgctgatgccttttcctccttcattccagccaccttccaactgatgcgcggctaccgcaccgccccataaaaaaccttttttaaatcctgacatacacaactccttaactaaaatagattaccaccagacttccgcctggatgccggccataaactcgtctttgctgttctcattaaacttaaaattcgataattcgttatccagaatattgatatacgttccatagaagcgaatttctggtcgtgaacctaaaatgctttcacccactttcaatgcatgccagagtgtcgttttataagccgattcatttagtgttacaccctgctgagttttgttctgttgcttaaaccagcctaattcaagccccgtctgattccatgtattccagatccaggccggtcttattacagtgcgaatactgtcaaaatcactatgagcaccactttcataactataaacatcttcgccgtgagaatagacaagcgcgttagccataataatattgtcagtaagatacatctcgccctgagagattaaacgccaggcgatcccattggtatgatcaccatagtaatagcgaccatgcgccatcgtattactggcatctgagaaactggcaaaactgctggcataggaattattggcaacctgtaacgtaaattcattaaacgtatcgcgttgcaggttttgccgtaaaacagaagtcagcatccagctatctttcatttcaaaataactgttgtcattttcgttatcttgttgttgatccgttttattaggtgcggaatatttagccattaatgataatgtcgcatcatcccataacgggatattgcgataacgaacatccacagaattggtattcatctggctagtacgcgaaaaatcacgagagtaaacatcgacatcatcacggcttaaggacatatcaaacagccctacaccaagtgcccagttttcaatccccacacccgcggcgacatccgtggttaaggttttccagtccagcatctggatctcatattgcgggagtttatgtttgccgacccagaagtctgcctctggtgcgaagggtaaaaaacctcgcgttgtcaggtaaatatcgctgaactgcatgatattttcattggcactgtcaccaaaccaggcatcgttatactgctcacccacgttgccatcataggtaacgaccgcatttgccgttttaccgtcctgattataaacacgctgatttaaggtcaggtcaaaccaaccgctcatctcattaccaaaacgtcccagagaacccgctgcataagtttgtggtgagccgtgattaccagtaccccagcctgagcggaagtacccctgatagctgaacccaatatcatcctttatatatttactgatatctttcagggtcacgctttcgatagtggttttgtcgcctttactttcaataacggcaacttgctgcgatccatttatagtatgcgctgcggcagacgagttctgttcaccgttttcatttttgatgttatcagcgacgggagatgtcgctgatatttcagcaagcgaggctgatttatatttgttttccgtgatgcttttttgtaaggtcgaaagtcgggatttatatactcccagttcattctgtgttgctttcagctcttgtttattttgcgacaattcattttcaagcaattcaaggcgctgctctatggttaattttgttgccatcgcgttcaatggaaacaatgctgtaataatagaaaaagacaaaaggctgacgttaagcgtctttatattcatgacttatccttaagagtataataatttcctccagctatcgcactggaggaaaaaatcaggcatggagttcttttcttaatgaaataatttccctggctaaatcctggcataatattgcattcatcaaatgatcctgtgcatgaatcagaattaaattaacttttattttgccacagccttcatcctgactaattaatgcggtctgaatcttatgtgcctgaagacaggcagattcagaactggccattagctgagttgcgccctgccagtctttttgcccggcacaacgtatggcttccatcgcgtcagaacgtgcctgccccgcgttgaccagtaactccataacaagttcttcatctgcaaacatcacaatctccttcctgggtaaatggaattatccgttagttgtcatgttattgactttgttggcggcaataacaaaaggtaaatagatcattgtcgccacacctaaacataaaaaaccaaccagtaaagccagccagttccccccggttccgaggaaagcaattaaaggtccgggcgtagtccagggcacggcataagcaaccggtggaataatttccatcgaaataaagaagtaaccaatggcacagttaacaatgggaaccataataaacggcaccatcatgatggggttaagtacaataggaaggccaaacattatcggttcattgatattgaaaataccggggataaatgacatttttgccagatcacggtattccgcacgcttagaagcgataaaaatagccaacaataaccccaacgtcatacctgaaccgccgcagttggcaaatgcatcattaatagaagtccaggtaatcggatatggcgcgccccaggtagtgccatgttgagcggcccaggagagattctccagattagcctcagaaaaaacggtttctcgaattgccgatgtggtattaggtccgtggatccccagcacccacaggaaattacccacagcccccaggataattaccgcaaagatattcgttcccatatgtttgagcggcgtctggattaatgtgtaaataagatcgtttagtcctgccggggatatcagtgtcaggcaataattaagtgcggaaaagaacaccatgacaaaaaatattggcaataaaactttaaatgaacgcgctaccgcaggcggtacagctgccggcatcgttatggtgatttttgggtttcgagctaagcgacaaaatatttcactggtgatcaatgcaacgataacagcaacaaacaacccctgcgcgccgagatatttggtcgtcaggaatgcttgcccatctatcatctgatatggcgtataaacaataaaaaatgctcctattgccgttaatccgcataaaagatcatcttgctcatagctaatcgccatattcctggcgaccaggaaagcaatcataattgacatgatatttacagaaccattcattaccggagtaaaaatagcttgtgctttttcaaggttggggaaaatgctattcagatgcagtaatccggcaataaaaccgtctggcgataatatggcaaagttaattaatataattaatgaacttgccatgataattggaaacgtaaaaacgaatccatctctcaccgctgcaacatgtttttgtgagtttaacttgatagcaactggaacaagaaaacgttccattccacgttcgaatgaggccattaatcccatttttttatacctgttgttttggatatttatacatcccaataaagcatgtatgccatatccattttatgatgtgtgaaaagttagttcaggtaatagtttaataatattagattcttactcttgcagtagtttcatcgcaaattcaagaactgcctgtccgttcatggtgccgtagtctttcatctcgataacggctacaggcattttcccctgtgcaacggcttcaatctctggtttctgaaagcgaacttgcgggccaagtaaaacaacgtcaacttcgttatttttaattttccctttagcctctgcaatcgccaatgcggaaatattaacttcaagtgaaatagcgttagcatgatcaatcatacgtttaaccagcatactggttgacatgcccgcagcgcaaactaacaatatttttttcatattttcccttactggtatataacagattacattgtttaaatatcatatcccgcagtagctatacgtcctggtacattgatcacagtaatacagtgataaagttgttcaacatcagggtgattattaaacgactcggccatacgataaaccaatcaggactcaactccttgttttcaatggctcttaaaaggtgcaaaagtgatttttcaaaagattgcccgcttacttaaatccgaaatcaatggcaattcatggcatgttggtgatttgttgccgtcagaagcggaactcgctgttcgttataatgtttcgcgtaataccctgcgtaaggcattatccttgctggaaggcgaaggaattattcacagaaagcatggttcaggaacatacattcaaaaaaagaattttgttgcacacattgatcacatgaacagtttcagtgaaattgcgcataaaagcggcaaagaggcagggagtcagattatgaaatttgaagtgcaggatgcttcacccactattgcgactgagctgaatttagtgactggtgagcaggtttattacataaagagactgcgattcattgaggataatgcagcacaattagaagaaacgtggatgtcagtagcacgttttcctgatttaaccgtgtcacatatgcaaaaatccaaattttcatatattgagaatgaatgcgggatcaaaatcattggcacctttgaaactttctcccctacttttcctaccccagaaatcgccagtattttacggatcagcccacgggatcccatacttaaaattcagacccaggctgtggacagtaactctattccgctggattattcgttactttacagcaatattttcgagttccaggtaaagtactttttcccgcgataaaagcagacgcacagagtgctgacatcacattctgtgcgtatggtttagcctctaacctttaccgctttacgccaccgcaagccaaatacattgatatacagcccggtcataatgagcaccgcacctaaaaattgcagacccgttaagcgttcatccaacaatagtgccgcacttgccagtccgactacgggcaccagtaacgataacggtgcaacccgccaggtttcatagcgtcccagtaacgtcccccagatcccataaccaacaattgtcgccacaaacgccagatacatcagcgacaagatggtggtcatatcaatagtaaccagactgtgaatcatggatgcggaaccatcgagaatcagcgaggcaacaaagaagggaatgattgggattaaagcgctccagattaccagcgacatcaccgccggacgcgttgagtgcgacatgatctttttattgaagatgttgccacacgcccaactaaatgctgcagccagggtcaacataaagccgagcatcgccacatgctgaccgttcagactatcttcgattaacaccagtacgccaaaaatcgctaaggcgatccccgccaattgtttgccatgcagtcgctccccgaaagtaaacgcgccaagcacgatagtaaaaaacgcctgtgcctgtaacaccagcgaagccagtccagcaggcataccgaagttaatggcacaaaaaagaaaagcaaactgcgcaaaactgatggttaatccataccccagcagcaaattcagtggtactttcggtcgtgcgacaaaaaagatagccggaaaagcgaccagcataaagcgcaaaccggccagcatcagcggtggcatgttatgaagccccactttgatgaccacaaaatttagcccccatacgaccactaccagtagcgccaacaccccatcttttcgcgacattctaccgcctctgaatttcatcttttgtaagcaatcaacttagctgaatttacttttctttaacagttgattcgttagtcgccggttacgacggcattaatgcgcaaataagtcgctatacttcggatttttgccatgctatttctttacatctctaaaacaaaacataacgaaacgcactgccggacagacaaatgaacttatccctacgacgctctaccagcgcccttcttgcctcgtcgttgttattaaccatcggacgcggcgctacgctgccatttatgaccatttacttgagtcgccagtacagcctgagtgtcgatctaatcggttatgcgatgacaattgcgctcactattggcgtcgtttttagcctcggttttggtatcctggcggataagttcgacaagaaacgctatatgttactggcaattaccgccttcgccagcggttttattgccattcctttagtgaataacgtaacgctggtggtgctcttttttgccctcattaactgcgcctattctgtttttgctaccgtgctgaaagcctggtttgccgacaatctttcgtccaccagcaaaacgaaaatcttctcaatcaactacaccatgctaaacattggctggaccatcggtccgccgctcggcacgctgttggtgatgcagagcatcaatctgcccttctggctggcagctatctgttccgcgtttcccatgcttttcattcaaatttgggtaaagcgcagcgagaaaatcatcgccacggaaacaggcagtgtctggtcgccgaaagttttattacaagataaagcactgttgtggtttacctgctctggttttctggcttcttttgtaagcggcgcatttgcttcatgcatttcacaatatgtgatggtgattgctgatggggattttgccgaaaaggtggtcgcggttgttcttccggtgaatgctgccatggtggttacgttgcaatattccgtgggccgccgacttaacccggctaacatccgcgcgctgatgacagcaggcaccctatgtttcgtcatcggtctggtcggttttattttttccggcaacagcctgctattgtggggtatgtcagctgcggtatttactgtcggtgaaatcatttatgcgccgggcgagtatatgttgattgaccatattgcgccgccaggaatgaaagccagctatttttccgcccagtctttaggctggcttggtgccgcgattaacccattagtgagtggcgtagtgctaaccagcctgccgccttcctcgctgtttgtcatcttagcgttggtgatcattgctgcgtgggtgctgatgttaaaagggattcgtgcaagaccgtgggggcagcccgcgctttgttgatttaagtcgaacacaataaaaatttaattcagccttcgtttaggttacctctgctaatatctttctcattgagatgaaaattaaggtaagcgaggaaacacaccacaccataaacggaggcaaataatgctgggtaatatgaatgtttttatggccgtactgggaataattttattttctggttttctggccgcgtatttcagccacaaatgggatgactaatgaacggagataatccctcacctaaccggccccttgttacagttgtgtacaaggggcctgatttttatgacggcgaaaaaaaaaccgccagtaaaccggcggtgaatgcttgcatggatagatttgtgttttgcttttacgctaacaggcattttcctgcactgataacggatcgttgacacagtagcatcagttttctcaatgaatgttaaacggagcttaaactcggttaatcacattttgttcatcaataaacatgcagcgatttcttccggtttgcttaccctcatacattgcccggtctgctcttccaatgaccacatccagaggctcttcaggaaatgcgcgactgacacctgctgtcacggtaatgttgatatgcccttcagaatgcgtgatggcatggttatcgactaactggcaaattctgacacctgcacgacatgcttcttcatcattagccgctttgacaataatgataaattcttcgcccccgtagcgataaaccgtttcgtaatcacgcgtccaactggctaagtaagttgccagggtgcgtaatactacatcgccgattaaatgcccgtaggtatcattaaccaatttaaatcggtcaatatccaacaacattaaataaagattcagaggctcagtgttgcgtaactgatgatcaaaggattcatcaagaacccgacgccccggcaatcccgtcaaaacatccatattgctacggatcgtcagcaaataaattttgtaatcggttaatgccgcagtaaaagaaagcaacccctcctgaaaggcgtcgaaatgcgcgtcctgccagtgattttcaacaatagccagcattaattcccgaccacagttatgcatatgttgatgggcagaatccattagccgaacgtaaggtaattcatcgttatcgagtggccccagatgatcaatccaccgaccaaactggcacagtccataagaatggttatccgttatttctggcttactggcatctctcgcgaccacgctgtgaaacatactcaccagccactggtagtgggcatcgatagccttattgagatttaacaagatggcatcaatttccgttgtcttcttgatcattgccactcctttttcacagttccttgtgcgcgctattctaacgagagaaaagcaaaattacgtcaatattttcatagaaatccgaagttatgagtcatctctgagataacattgtgatttaaaacaaaatcagcggataaaaaagtgtttaattctgtaaatcacctctgcattatcgtaaataaaaggatgacaaatagcataacccaataccctaatggcccagtagttcaggccatcaggctaatttatttttatttctgcaaatgagtgacccgaacgacggccggcgcgcttttcttatccagactgccgctaatgttgatcatctggtccggctgaacttctcgtccatcaaagacggccgcaggaataacgacattaatttcaccgctcttatcgcgaaaaacgtaacggtcctctcctttgtgagaaatcaaattaccgcgtagtgaaaccgaagcgccatcgtgcatggtatttgcgaaatcaacggtcattttttttgcatcatcggttccgcgatagccatcttctattgcatgaggcggcggtggcgctgcatcctgttttaaaccgccctggtcatctgccaacgcataaggcatgacaagaaaacttgctaatacaatggcctgaaatttcatactgactccttaattgcgtttggtttgacttattaagtctggttgctatttttataattgccaaataagaatactgccaattgttataaggcatttaaaatcaggcaactagctgtcaaatattcagagaatttaactcactaaagttaagaagatcaaatagtcttaaatatattttcagaataatcggatttatatgtttgaaaattattatattggacgagcatacagaaaaagcaaatcacctttacatataaaagcgtggacaaaaaacagtgaacattaatagcgataaaattgtacaacttgcagataccgacactattgaaaacctgacatccgcgttgagtcaaagacttatcgcggatcaattacgcttaactaccgccgaatcatgcaccggcggtaagttggctagcgccctgtgtgcagctgaagatacacccaaattttacggtgcaggctttgttactttcaccgatcaggcaaagatgaaaatcctcagcgtaagccagcaatctcttgaacgatattctgcggtgagtgagaaagtggcagcagaaatggcaaccggtgccatagagcgtgcggatgctgatgtcagtattgccattaccggctacggcggaccggagggcggtgaagatggtacgccagcgggtaccgtctggttcgcgtggcatattaaaggccagacctatactgcggttatgcattttgctggcgactgcgaaacggtattagctttagcggtgaggtttgccctcgcccagctgctgcaattactgctataaccaggctggcctggcgatatctccaggacagccattggtggtgtttatatgttcaagccacgatgttgcagcatcggcataatttgaggagccttaccgcgccattgtcgatacaggcgttccagatcttcgctgttacctctggaaaggatcgcctcgcgaaaacgctgcccattttcacgcgttaatccgccctgctcaacaaaccactggtaaccatcatcggccaacatttgcgtccacagataagcgtaataacctgcagcatatccgccaccaaaaatatgggcgaaataactgctgcgatagcgtggcggtatagcaggaagatccatattttccgccaccagcgcccgcaattcaaaatcatcgacatcctgcattgcttcgttttcttccaggcaatgccagcgcatatcgagaagtgcggcgctaagcagttcgctcatctcataccctttgttgaacaggctggcattacgcattttctgttgcagttcgtcaggcattgctgccccgctctgataatgccgggcgtagcgagcgaatacctgcggatgcgttgcccagtgttcgttgatttgcgacggaaattcgacaaaatcacgcggcgtgttggtgccggaaagcgtggcataacgctggcgggcaaaaaggccgtgcagcgtatgaccaaattcatggaataaggttattacatcatcccagagtaacaacgcaggctcaccggcagcgggtttctgataattgcaaacgttataaattaccggatgcgtttcattaagcgttgattgctcaacaaaattgcccatccatgcaccgccgctttttgaatcacgggcgaagaaatcaccgtaaaataacgccagtcccacgccattatgatcaaaaatttcccacacacgaacgtcaggatggtagacaggaatatcaaaacgttcgacaaacttaataccgaagagctgattcgcggtccagaatacaccttcattcaacaccgtgtttaattcaaaatatggcttgagctgcgcctcatcaagatcaaatttctcccgccgtacctgttcggcataaaatgcccagtcccacggctgcgcgctaaacccgccctgctgcttatcaataaccgcctgtatggaggctaattcatcgctcgcacgttgacgcgccgctggaacaatttcccgcataaagttgagcgctgcttcaggtgtttttgccatctgatcggcgattttccatgcggcataatgaggaaaaccaagtaatgtcgcctgttgtgcacggatctccaccagacgttgaatgatagcgcgggtatcattgccatcatttttttccgctcgcgtccagcccgcaataaacagtttttcacgcgtcgcacgatcgcgcatttcggcaagcgccggttgttgggtggtattcagcagcggaatcagccatttgttatccagacctttctcgcgagccgcctctgccgccagcgcaatctcttgctcactcattcctgccagctgcgcgatatcgttcacaaccagaccgccggatttatttgctgccagtaaccgctggttaaactgactggtcagtgtcgcagcttctgtattcagtacttttaattttgctttatcagcttgcgcaagtttggctccggcaaggacaaaacgttgatgaatcacctccaccaggcggatggattcactatcaagccccagggattcacggcgctgccagacagcatctacccgcgcgaataattcaccgttcagatagatatcattagccagttccgccagttcagcggaaaactgttcatcaagacgctgtaattcatcattggtatgcgccgcagtcatcgcaaaaaagacgctggtaacgcgggtaagtaattctccgctttgttccagtgccagaatagtattgttgaaatcaggcgtttgcgggttaagcgcgatggcagcaatttctgcccgcttttgctgcattccctcatcgaatgccgggcgatagtgatgattggcaatttgatcaaaatgaggagccagatacggcagtgtgctttgcacaaggaaaggattcattgttgtcattttcttctcctgaacgcgaggtgttccatagcgtaggcttactgataacggagtgcaatcttgcaatccagtattacccgctcttaagcatcccgtgctatgttattgacacacaaaagcgttgaggaacagtgagatgatcgttttagtaactggagcaacggcaggttttggtgaatgcattactcgtcgttttattcaacaagggcataaagttatcgccactggccgtcgtcaggaacggttgcaggagttaaaagacgaactgggagataatctgtatatcgcccaactggacgttcgcaaccgcgccgctattgaagagatgctggcatcgctccctgccgagtggagcaatattgatatcctggtaaataatgccggcctggcgttgggcatggagcctgcgcataaagccagcgttgaagactgggaaacgatgattgataccaacaataaaggcctggtatatatgacgcgcgccgtcttaccgggtatggttgaacgtaatcatggtcatattattaacattggctcaacggcaggtagctggccttatgccggtggtaacgtttacggtgcgacgaaagcgtttgttcgtcagtttagcctgaatctgcgtacggacctgcatggtacggcggtgcgcgtcaccgacatcgaaccgggtctggtgggtggcaccgagttttccaatgtccgctttaaaggcgatgacggtaaagcggaaaaaacctatcaaaataccgttgcattgacgccagaagatgtcagcgaagccgtctggtgggtgtcaacgctgcctgctcacgtcaatatcaataccctggaaatgatgccggttacccaaagctatgccggactgaatgtccaccgtcagtaatttttatacccggcgtaactgccgggttattgcttgtcacaaaaaagtggtagactcatgcagttaactcactcacaagcaagaacgaatgaccgtcgaaacgcaacttaatcccacacagcctgtcaatcagcagatttatcgtattcttcgtcgcgacattgtccattgcctgattgcaccaggcacaccgttgtcggaaaaagaagtttctgttcgtttcaatgtgtcacgccagccggttcgtgaagcctttattaaactggcggaaaacggcctgattcaaattcgtccgcagcgtggcagctacgtcaacaaaatttccatggcccaggtgcgaaacggcagttttatccgtcaggccattgagtgcgcggtggcgcgtcgggcggcgagcatgattaccgaaagccagtgctaccaactggaacaaaatcttcaccagcaacgcattgccattgagcgcaagcaactggatgatttttttgaacttgatgacaacttccatcaactcctgacgcagattgccgactgtcaactggcgtgggataccattgagaacctgaaagcgaccgttgatcgcgtgcgctatatgagtttcgaccatgtttctccaccagaaatgctgttacgccagcatcttgatattttctctgccctgcaaaaacgtgatggcgatgcggtagaacgtgcaatgacgcaacatttgcaggaaatcagcgaatccgtgcgccagatccgccaggaaaacagcgactggtttagcgaagagtaattcatttactctcatcccatccgggatgagaggcttttccccccgccttacggctcatgcatgcatcaaaaaagatgtgaccttgatcaaaaacaaaaaatatttcactcgacaggagtatttatattgcgcccgttacgtgggcttcgactgtaaatcagaaaggagaaaacacctatgacgacctacgatcgtaaccgtaacgcaatcaccactggcagccgtgttatggttagcggcaccggtcacactggcaagatcctgtcgattgatactgaaggtctgaccgctgagcaaatccgccgcggaaaaaccgtagttgttgaaggttgtgaagagaaactggcacctctggacctgattcgtctcggcatgaactaagtgtgtgaatgccgccgatggcggcattgctttttttacttcacggaatatttcgccacggtcgctttcgcgccatgcgctaataaagacaagtacgcttccgtcacttttgcagtaaacaagctattgtctggcaaatcatcaccaaagattgccttaatcgccagcaatgactggacgcgcgctttcccttcggcactactttgtacagccttctgaataacaggtaacagtgggtcactgatttctatcggatttccctgttcatcaacaccaccgacataacgcatccaacccgcgacgcccagcgccagcagatcgaacttgctgtcatgcgccagatgccagcgaacagaatccaacatccgctgtggcaatttctggctaccatccatcgcaatctgccaggttcgatgacgtaacgccgggttgctatagcgtgcaattaatcggttagcgtaatcttgcaaatcaacgccctgcactttcagcgtcggcgcttgttcctgcaacatcaagccatacgccgcataacgataatgttcatcttccatgcagtcattaatgtgctgatatccagcaagataacccaaatacgccaggaatgaatgactgccgttgagcatgcgcaacttcatctcttcataaggcagcacatcactaaccagttcggctcccgctttttcccattctggacgtccggcaacaaagttatcttctattacccactggcggaaaggttcacaggcaacgcccgcaggatcgcccacaccggtaagttgttcgattttcgccagcgtatcctctgtcactgcgggcacaatacggtccaccattgttgatgggaaagtcacgttatcttcgatccattgtgccagtttttcatcaacggctttcgcgtatgaagtgacaacgtcacgcataacatgaccgttttctggcatgttgtcacatgacatgacggtaaatgcgggaagtcctgccgctttacggcgggccagcgcctcaacaatcacccctgttgctgttttcggctggtggggattttgcacgtcggcagcgaccatcgggtgatcgagcattaactgtccggtcgccggagagtggaaataccctttttcggtgattgtcagagagacaatcgcgatttgcggttcacacatcgcagccaacacggtttctaagccatccatctgtacgtgcaaggcttttttaacgacgccaacgacgcgagccgtccacgcatcggccgacatttccgcaacggtataaagattatcttgctgttgtaaatcggcaatttgctgttcgccgccgattaagttgacctcataatatccccagtcactgaaatgttctgtagcaagaatatcggcatacacgccctgatgcgcacggtgaaatgcaccaaagcctaaatgaataattcttggggccaggttattacgatcataaacagggagtgtcgcttttgctgataacaaattatttcccataacaattccttaaatttaaatatggcaagctatatgttttgttatatgaataaaaatcccctctccggtaagagaagggattgagggtttacagacttctggaaggttgcgcagctcttacaacacgcggttgatcttccgcagcgtcttccagcgcacttaaatcacggtctttcacctctggcattttcagcgcagagattaaaccaattactgaatatgccatgatcataatggcgatcggataccaggattccgtcatggtgcagaaaatacccgccaggataggaccaaaaccggaagcgataagaccaccaatttctttagaaatagccatccgggtaaagcggtttttacagccgaacatttctgccatggtaatgttttccagagcaaataatcccagcaccgcacagttatgaatcacaatcagtgcaaccataatggtgctcggggcatagcttttatctacaatgatagaaagcattggccatgccagcacaatcgcggaggtattcataataatatacgggatccggcgaccaattttatcggataaccaaccaaggaacggaatggtcataaagccgagaatcgaactaatcatcaatgcatctgttggaattgctttgttaaacaataacgtctgcactaaatagcctgcaaggaaagtctgaattaacccggagttacccgcctgaccaaaacgcagccctgttgccagccagaaggatttgctctggaacatgctaccagcaggtgcaggttttgctgtgggttggttgctgtcattaaccttctcaaagaccgggctttctttcagattcatacgtaaccagatagcaaagaccatcacgacaacgctcgccaggaacggtatacgccatccccacgccagcagttcctctttactgagaatgaagaacataaaggcccagattgccgttgcgctcaaggttccgcagttagttcccatagctacaaatgaggagataattccgcgcttaccttttggtgcatattccgccagcatcgtaccggcaccggaaatttccgcacctgcacccaacccctgaataatacgcagcgtcaccagcaagatgggggcaaaaacaccaatctgtgcataggtcggtaacacaccaattaaggtggtacagatccccatcatggtgatggtaataaagagcacttttttacgccctattctgtcgcccattttgccgaaaataaatgctccgacaatacgcgccacataacctgcaccgtaggttcccattgccaaaattaacgccattgccgttgatgattcaggaaaaaatatttcatgaaacactaacgctgcgccgagcgaatataactggaaatccataaattcaagcgcwgtgcccagcca

SEQ ID NO: 159 - DNA, 343 bp, Escherichia coli
  modified_base (26)..(29): a, c, t, g, unknown or other
  modified_base (33)..(35): a, c, t, g, unknown or other
  modified_base (45)..(47): a, c, t, g, unknown or other
  modified_base (56)..(58): a, c, t, g, unknown or other
  modified_base (61)..(67): a, c, t, g, unknown or other
  modified_base (78)..(80): a, c, t, g, unknown or other
  modified_base (83)..(84): a, c, t, g, unknown or other
  modified_base (89)..(91): a, c, t, g, unknown or other
  modified_base (106)..(108): a, c, t, g, unknown or other
  modified_base (110)..(110): a, c, t, g, unknown or other
tacaggccactcaatatcaggtgcannnnatgnnncaacacggtnnngcaacaccnnntannnnnnncaggcttccannnatnnggttnnntcctccgttgcgatnnncngatctacagcatcctgaagtggcgcaatatgctcactggctacctgcatcaggctgttttttgtttcttccgccttccggatccggaacagtttttctgcttctgcatctttcacccaggctgtgccgttccacttctgaaactccccttccggggataaccaggtgacattttccggtaatgggccaagttcagaaataaataacgcgtcgccggaagccacgtcatagacg

SEQ ID NO: 160 - DNA, 377 bp, Escherichia coli
  modified_base (7)..(7): a, c, t, g, unknown or other
  modified_base (226)..(226): a, c, t, g, unknown or other
  modified_base (240)..(245): a, c, t, g, unknown or other
  modified_base (251)..(256): a, c, t, g, unknown or other
  modified_base (272)..(274): a, c, t, g, unknown or other
  modified_base (278)..(278): a, c, t, g, unknown or other
  modified_base (376)..(376): a, c, t, g, unknown or other
tatctgncggtgcaatatcggtactgtttgctggcagacctgtatgaggcggaatatatgcgtcaccttcaccaataaattcattagttccggccagcagattataaatttttatggtccgtggttgttcactcattctgaatgccattatgcaagcctcacaatatagttaaatgcgatgtttttgacggtgttttccgcgttaccagcagcgttaatggtgatngtgtgtccatgtgnnnnnntcgcannnnnntgcgtatgagcaccannnccgncagtatgtgcatgtgcgcctgcgcttgcagcagctgccggacagcgagtgggtatgagcaccatctgatgatgtcttccctgcattacgagtctggcna

SEQ ID NO: 161 - DNA, 360 bp, Escherichia coli
  modified_base (11)..(14): a, c, t, g, unknown or other
  modified_base (71)..(71): a, c, t, g, unknown or other
gctgtactatnnnntttttcgtcgtgctcgcatcctcaagcgccacggcggatgcaatatcctctgcccgntttgctgctgtctcggcgcgcgttgccgcggattccgccgtactyttgctctgagctgccgccgtcgcactgccagctgcctctgtcgccttcgtggatgccgtcgtggcrctgcccttcgctgctgacgcctgtctggtcgcctcatcttttgaagcagacgcagatgatgccgatgacgccgccgaactggcggacgatgcggcagccgtttttgaggattctgcgctggtttccgacgctttcgcgttcgtctcggatgtcttcgctgcggaagcagacctcgctg

SEQ ID NO: 162 - DNA, 206 bp, Escherichia coli
  modified_base (8)..(11): a, c, t, g, unknown or other
  modified_base (24)..(28): a, c, t, g, unknown or other
  modified_base (183)..(183): a, c, t, g, unknown or other
cgaggctnnnntcgtttctgatgnnnnngcygcctcttttgaggccgccgcatcccgtgctgaagtggctgcttctgacgctttcgtggtcgcggtggatgcagaagtggctgctgattgttgtgacgcagccgcattcgtttctgacgttttcgccgcaccggcactggtrgccrccacgcnttttgagaactctgcagcggcag

SEQ ID NO: 163 - DNA, 242 bp, Escherichia coli
  modified_base (212)..(212): a, c, t, g, unknown or other
  modified_base (219)..(219): a, c, t, g, unknown or other
  modified_base (226)..(230): a, c, t, g, unknown or other
gcacggaatcttcatgccagcgggtatcgctgtaacgggtcagctggcgattcttgtctcctgcatagctgaatgacgtcaccagccccagtgtgtccgtaaactcataacggtatttcacgttaatcccgttcagatcatcactaccgggaacgttcgtcgaggcatggagataccccgcgctcagcgtggactgatgttctgctgcactngcaggcncaccggnnnnngccagacaaatg

SEQ ID NO: 164 - DNA, 477 bp, Escherichia coli
  modified_base (354)..(354): a, c, t, g, unknown or other
  modified_base (362)..(362): a, c, t, g, unknown or other
  modified_base (367)..(367): a, c, t, g, unknown or other
  modified_base (372)..(372): a, c, t, g, unknown or other
  modified_base (376)..(376): a, c, t, g, unknown or other
ctttgaaaaaatccaggtaaccttccgcatcatcgctcgcccgaccgacggcctccacgaatgccgatttgccaacggtgttcacactgcggatataaaagtaataatcatggcccggtttgatattgatactggcggctatccagtacagccccgtgccaaggtagcgcgcgctggtttcaacctgcctgatatccgcaatccgcgtttccgagaaccagaactcaaactgtaccgtcggatcataaaccgcaagatgcggcgtggcggttatctgaaaatagcccggcgtcagctcaatccgcgacggcgctgccggtgcggcaatccggaacgataccgacgccggatcgncctgctgnccccnggcanttgncgcccggactgtcagcctgtagtttcctggcgccagttgcgtgaagcggtatgtggtttccgtcgtccgggccgtgctgaccagccgctcactgccgtcat

SEQ ID NO: 165 - DNA, 312 bp, Escherichia coli
  modified_base (2)..(2): a, c, t, g, unknown or other
  modified_base (4)..(5): a, c, t, g, unknown or other
  modified_base (7)..(7): a, c, t, g, unknown or other
  modified_base (10)..(13): a, c, t, g, unknown or other
  modified_base (15)..(15): a, c, t, g, unknown or other
  modified_base (18)..(21): a, c, t, g, unknown or other
  modified_base (41)..(41): a, c, t, g, unknown or other
  modified_base (51)..(51): a, c, t, g, unknown or other
  modified_base (65)..(67): a, c, t, g, unknown or other
  modified_base (289)..(293): a, c, t, g, unknown or other
  modified_base (303)..(303): a, c, t, g, unknown or other
  modified_base (306)..(309): a, c, t, g, unknown or other
cngnnantcnnnnancgnnnnaggcgctggcgcagcgtcgncagcttcagnccccacacgctgtnnncggcaacgccgtcaggaacacggctcactttcaccttcacgccgtcggtgacggactggacctccacgctgaccggattaccctgaccgtcaaccaggcttatcagcgtggtaccggaggatggcagcgtgatttcacggtcgagcgtcagcgtccgggtctggctgttcaccgccagcacgcgcccgccggtgctgatacccgcatagtcatcatcacagnnnnnaatgacatcnccnnnnaca

SEQ ID NO: 166 - DNA, 234 bp, Escherichia coli
ccggcatagtcatcatcgcagatttcaataacatcgcccggtacatggcgaagcccttcggcacccacgctgaagtccacggtctgcgtttccagcagctccgttttaatcagccacagcccggcgcggtgtgcctgcccccggctggtacagccaaaggcatccatcttcgtgacgttacgaccrtaacgggcaatggcctgcgtatcttcaacaagctctgtcgccgtctcc

SEQ ID NO: 167 - DNA, 440 bp, Escherichia coli
aggtccacacattatccgacggtcggtcctgcacgaacgtcagcgtctgcccgttccataccggcatacagcgcatcgccgagcagaaatcactgagmacatcccacgccttgcgctgtgtggtcagccaggcattacaggtgatgcgcggctccgtgccgccaaagccgtccggcaccgactggtcgcagtactggccgatgacatacagcgcccatttgtccacatccgccgcaccaagacgtttccccatgccgtagcgcggatgggtcagcatatcccacagacaccaggccatgttgttgctgtatgctggcttaaacgttccgtcccagataccgctgtattgccgcgtctgcgggttatagttcgacggcacctgcagaatacgcccgcgcagatgataattacggctcacctgctggctgccgaactgctcc

SEQ ID NO: 168 - DNA, 443 bp, Escherichia coli
  modified_base (442)..(442): a, c, t, g, unknown or other
ttcgacggcacctgcagaatgcgcccgcgaagatgataattacggctcacctgctggctgccgaactgttccgagtccacctgcacgccgaccagtgccgtgttcgggtagcactgtttcacatcgatgatttcggtgtatgacgaccagagcgttttgttctgcagctggtctgtggtgctgtccggcgtcattctgcgcatccggatattaaacgggcgcggcggcaggttatccaccaccaccgaggccagatactgcgaggtggttttgcccttaatggtgatgtctttttccgtcacccagccaccattacgctggatctgaaccagcaggcggacttccgacggattccggtccccctttgaggtggtttccaccagtgcctgcacaccgaaggtaaagcgcagtcggtcgatgtttgccgacgtgatggcgcggnt

SEQ ID NO: 169 - DNA, 316 bp, Escherichia coli
  modified_base (4)..(6): a, c, t, g, unknown or other
  modified_base (8)..(8): a, c, t, g, unknown or other
  modified_base (13)..(13): a, c, t, g, unknown or other
  modified_base (52)..(52): a, c, t, g, unknown or other
  modified_base (63)..(63): a, c, t, g, unknown or other
  modified_base (65)..(65): a, c, t, g, unknown or other
  modified_base (71)..(73): a, c, t, g, unknown or other
ctgnnnancagcncggaacaccaccgtgacaccggcgatgttggtattcccntcactgtccancnccggcnnnctgttcagcagcacgctttttaatccatccaccggaccttcaaccggcccttcgctgatggcatcgatcacactcagcaactgcgtggacttcaggttgtccttcgcttcgcgcggggtatgccccttactgcttcctttacccattcctcacgctccataaatgacaaaaccgcccgcaggcggtttcacataaaacattttgcatcagcgaccaatcaccacaacctgaccaccatcccct

SEQ ID NO: 170 - DNA, 215 bp, Escherichia coli
  modified_base (6)..(6): a, c, t, g, unknown or other
  modified_base (21)..(21): a, c, t, g, unknown or other
atcgtngcaaatccccgtaanggcagatgcgtgccatgcccggtgatgccagagggagtgtgtgcgtcgctgccatttgtcggtatacctctctcgtttgctcagttgttcaggaatatggtgcagcagctcaccgtcgccgcagtaaatggcggcgtgattcggcaccgatgaaccaaaacagcacagcagcacatcgcccggctgcgccgctg

SEQ ID NO: 171 - DNA, 441 bp, Escherichia coli
  modified_base (2)..(2): a, c, t, g, unknown or other
  modified_base (10)..(10): a, c, t, g, unknown or other
  modified_base (299)..(299): a, c, t, g, unknown or other
  modified_base (310)..(310): a, c, t, g, unknown or other
anccaccacngcaaatcactctgcacctgcagccgccggtcagcctcactcagccagggcagaccaccggggtggctgtggaccagcgccacaatctcaccctgcatctctgcccgcagccagtcctccggcgacatccggaaatactcctccggctcaccggagatattcacgcagggaaaatatctttccccttccggcgttctcaccacgaagccgcacgactccgctggcgcacatcgccgggcgtgcgccagaatcgctgattctgtctctgtcatgggatttactgcgaaagnttgttaatggnaaggaagccgccaaagttgccgacgttattgcgaaacttacagcccgctcaggcatttgctgcatttatccttcgtgatatcggacgtcggctggtcatattcatccgcgactgccggaccgtgataaccg

SEQ ID NO: 172 - DNA, 266 bp, Escherichia coli
  modified_base (239)..(240): a, c, t, g, unknown or other
  modified_base (243)..(243): a, c, t, g, unknown or other
  modified_base (249)..(254): a, c, t, g, unknown or other
accascrkyatcaakcttgcgacgaagagcatcattttcagctttcgcatcagctaactccttcgtgtattttgcatcgagcgcagcaacatcacgctgacgcatctgcatgtcagtaattgccgcgttcgccagcttcagttctctgacatttttgtcgcgctgggctttgtaggtaatggcgttatcacggtaatgattcagccccagactaagcgcaccacagrccrccagcaggnnaangatgannnnnnacagtacgcggt

SEQ ID NO: 173 - DNA, 931 bp, Escherichia coli
gtaccagcacctgaatccgcgattatcccatatacctactcgctgattgcccctccgcacagggggattcaccatgccagtttcttttaacaaactccccgcaaaccagacaacagtcaaccgcctgaattgtgaagtatttaaaaatttctcccgctaactgatacccggctaacagtctggcgttttctttttcagcaacgggaaagcagcaaccaccacacccgccaccagcacaccgtcagccagcactgacattatccggctgctgcaatgccattcacaaaaacagtaagcaatcactttttaccgtaaccggtgataatccagatatgtatctaccccagatgagtaatccgaagttcatccataccacaggtcctggctattctgttgtactcctgaacaagagcaaataattctgaattagccaccatgaactcatcgcaaaccctctgtatagcatcactattcagaataataacgtctcttcccgaaagacgatcaggagtacagaacaaaactgtcaaacggctgaaggcctttgctcgttctgcattgactatatcaatacgctgcctaaggatgaaacaccccgacgcctcatcaatattcactctacccacaccatatgaatgataaatatttaatgctgaaaaaaccattagaccgtataacaaacactcaatcaacacttaacagaacttttatttttgacaaacatataatattttcaacaatatcctgagccaggtatatttcagtataaggctctgccgaaaggaatctggaagaatgaatatggcgcgctgtactggattcgaaccagtgaccgattgcttagaaggcaattgctctgtccggctgagctaacaacgcagggtacagataatggaccgccatcgaggactcgaaccccgcgcaaccagct

SEQ ID NO: 174 - DNA, 561 bp, Escherichia coli
  modified_base (12)..(12): a, c, t, g, unknown or other
  modified_base (15)..(15): a, c, t, g, unknown or other
  modified_base (26)..(27): a, c, t, g, unknown or other
  modified_base (528)..(528): a, c, t, g, unknown or other
  modified_base (535)..(535): a, c, t, g, unknown or other
  modified_base (546)..(546): a, c, t, g, unknown or other
tacaggcggtgnaancctcacccttnncgccacactccggacaggcaacttttaccacctccctgacttttttccattcttcccagtaagacggatacacacctttcgtacactttgcccataccggcggcttaccatccggatactggatcttgtttgtaaaaactacgctttcaataaatttttccccatagcagcaagggcactgctttttactcgccgcgctgcgggcataatcctcaaaagcgtacgaagccataatgcgcatcactamcggttttatttctgccggaagttttctcaacgccgccacacgatcgcaccgactgagtgcataatctgccagtaattctgttgcccgcgccctgtcattcatactgatgcccatttccccaggaacgcagaaaacccatctcagcccgattctgtgtcatgccctgcgcggccatcacatcagtgatactcagcgcatcttttgacgttgaggccgatgcatcggtcaggcmaggggattttggggagtagtanttcggtnaatcttccagnttcattttttgacct

SEQ ID NO: 175 - DNA, 762 bp, Escherichia coli
  modified_base (14)..(14): a, c, t, g, unknown or other
  modified_base (40)..(40): a, c, t, g, unknown or other
  modified_base (42)..(43): a, c, t, g, unknown or other
  modified_base (72)..(72): a, c, t, g, unknown or other
  modified_base (79)..(79): a, c, t, g, unknown or other
  modified_base (267)..(267): a, c, t, g, unknown or other
  modified_base (721)..(723): a, c, t, g, unknown or other
  modified_base (755)..(755): a, c, t, g, unknown or other
catgcattatgggntaaatcttcacccccagacgtccacnanntactggctgaccacgaacgatattgattncatcaanctgctcatcgtcyatkagaastccsgcatgcgtcagcgcatccagtggtgctttcagaatattgtccaggtcgcgacgacgcttatccggtggctctgcaatcacctttatcgccagccttccggacaggcttaatttcagccgctgctggcgaacaataagcgccacagcccggcgataacgctttncctcctccgagataaaatatgtgctgccacggcgtcgccagtaagtgttcaccgtcggcgggtaaggtaaaccaaatctatgagcatcagtcacctcttttacccaagcacgccagttgcaaaggcgtgatcaagaaaacgaaaaattaaatcaacctgagaaccatgcttttcttcgaacgccagaggatccgcatgaagctcgttgtgatgctcccgacacagcggtagcgtgaaaatatcgtgagattttgtccccattccgccctgaccatgaccaatcaggtgatggggatcgtcggctggcttaccacaacacgcacacggctgtgtcttcacccagcgtgtgtatttctcgttaacccagcggcgacgtttaggtcgtttcatgaaagattccggagactcaggatcaacggcaatgctgaccaccgtctcttcctgtggygggttnnnttgctggtgggcgtgaggcagcggcgcaagantttttgt

SEQ ID NO: 176 - DNA, 272 bp, Escherichia coli
  modified_base (135)..(137): a, c, t, g, unknown or other
  modified_base (143)..(145): a, c, t, g, unknown or other
  modified_base (147)..(151): a, c, t, g, unknown or other
ccggcttaacgaccaccagcccgagttccggtaccagaacaggtcgaagtaatacccgcacgttacctccagatgcgttgctggaatgtgcgggacggacgcggtgggcgttcrgagtaaggmaryctgackgannntatccnnngnnnnnagtcgaggctaagggcttttttaacctcgtatccgcgcctgcggtaacactgaatgagccattcggcctgttcttcagtgcatgggggatgctggtaccagtctgacttaaatgcgtgaga

SEQ ID NO: 177 - DNA, 360 bp, Escherichia coli
atcaagtcaatacaaaattagtcaggctaatgttgttagcatagcctaataccaatcgtattcacaaccacagtaagtgaaaaaacccgccgaagcgggttaagtgcgggtgcgttgaggatgcctgmcacatcagaggtggcgagggatttctccctcgccgggtctcttactcctcaggttcgtaagctgtgaagacagcgacctccgtctggccggttcggattcgtacctcgcagaggtctttcctcgttaccagtgccgtcactatgacggttaaacagatgacgatcagggcgattaacatcgccttttgctgcttcatagcctgcttcyccttgcctttcggcacgyaagagg

SEQ ID NO: 178 - DNA, 402 bp, Escherichia coli
  modified_base (170)..(170): a, c, t, g, unknown or other
  modified_base (187)..(187): a, c, t, g, unknown or other
  modified_base (209)..(209): a, c, t, g, unknown or other
  modified_base (214)..(214): a, c, t, g, unknown or other
  modified_base (219)..(219): a, c, t, g, unknown or other
  modified_base (226)..(226): a, c, t, g, unknown or other
  modified_base (375)..(377): a, c, t, g, unknown or other
  modified_base (397)..(398): a, c, t, g, unknown or other
ctctggcgcacgagttccaccacctgccctttaattttttcccgctcttcttgtgtaaaaacttttgccacaagtcccccttaaaattacctcatgacctgaaatcaaaacttatcctctgaaaccaggcggaatttctgtatccggttcagaaatatgattaacacaangctgtacaggtgaacgncccaggcggatgaccagttcgncccanttttngcggagntttgacggrctcatgatgttttttacccagaacgratcccgctggagacgcccaaacatttcacaaatttgtctgtgagttctgccatccagcatccgcattgtgcgaacgtcattggcccakrctgtccagttaggctcttttggtcnnntgatctcgccatcatcactnncggc

SEQ ID NO: 179 - DNA, 593 bp, Escherichia coli
  modified_base (83)..(83): a, c, t, g, unknown or other
  modified_base (198)..(198): a, c, t, g, unknown or other
catcacgttatcacatccaccagcaggacgtgtgaccatctaatgatcgaccttgaaaccatgggaaaaaatcctgatgcccngatyatctcaataggtgcaatatttttcgatccgcaaaccggagatatgggaccggaatttagtaagactatcgatctggaaactgctggcggagtcattgatcgkgacrycatnaaaaggtggcttaagcaatcacgcgaagcgcaatctgccattatgaccgatgaaatcccgttagatgatgcactgttacaattgcgggaatttatcgatgaaaactccggtgaattttttgttcaggtttggggaaatggagccaacttcgacaacacgattttgcgccgttcatacgaacggcaggggatcccctgcccgtggcgttactacaacgatcgcgatgtacgcacaatcgttgagctggggaaagccatagacttcgatgccagaacggctattccattcgaaggtgagcgccataatgcacttgatgacgcccgttaccaggcaaaatacgtttcagttatctggcaaaaactgatcccgagtcaggctgatttttaatgttcaac

SEQ ID NO: 180 - DNA, 986 bp, Escherichia coli
aaaaatatttcatgaaacactaacgctgcgccgagcgaatataactggaaatccataaattcaagcgcagtgcccagccatcccgatactgctgctttcaccaaatccttagtgcttctttcatgtttttctattgtcataatggttatctctaaaaaagaggtaagatgcgtactacttactcgccgttattggtattattcagaaaaagtgagtaagactttgcagcaatgtttttgatcctgttcaaataaactaatggcatcagcaacatgctggaaatcaaacgtatgggtaattaatttttctggtttaattaaccctttacttaaccagtcgataacaaccggaaatttatttgcatttaagcgtgaagagaaaatagagagttcttttccggtaattccttgctgaatcacttcagacggttcactggagaagcccatcaatacaatacgtgccgctggagaagccagcgttacggcctctttcaggatagaaggatgacaagccgcatcgataattaatgtcggcttgatgcctttttcagcgaaaatctcgccaagcggtgtctggctgttattaatcgccctgtctgccccgctctctttcgctttttccagtcgttcatcaatgcgatcggcaacaatcacatttttaacgttatagacgccttttaatacctgaacgatcgtcaggccgattggaccggcaccataaaccagaacggtatcattttcagtcggttgaccatgtccggttacgttagccgcaatggtaaaaggttcgatcatcaccgcatattgatcggccactgcttcaggaattttccacgcattttttgccggaaccacggcatattcactgaaaccaccgtcagcgtgcacacctaatacagcaagtgtcgtacaaacgttcggtttacctatagagcacggatagcaatgcccacagctgaccaccggatcgacagcaacacgttcacc

SEQ ID NO: 181 - DNA, 339629 bp, Escherichia coli
  modified_base (253221)..(253223): a, c, t, g, unknown or other
  modified_base (253228)..(253228): a, c, t, g, unknown or other
  modified_base (253231)..(253231): a, c, t, g, unknown or other
  modified_base (257443)..(257443): a, c, t, g, unknown or other
acctaatacagcaagtgtcgtacaaacgttcggtttacctatagagcacggatagcaatgcccacagctgaccaccggatcgacagcaacacgttcaccgactctggcgctttccacgccgtcacccaccgcatcaatgacgccaaagaattcatgtccaatgacgcgcggatatttcgcaaaaggattatgcccacgataaatatggctatcagaaccacaaattccggcaagtttcacttttactcgtacttcacccgctgacggggtgggtatttcacgttcgacaatcgccagttgattcggtttttcaattaatatgcttttcattatcttactccttaccagttccacagcgtgccatcttccagacgtgcgactggtagataagcaggttcatagggatatttcgccgccagcttttcatcgaattcgatgccaagacccggtttgtctcccggatgcatatagccgttatcgaaagtccagttgtgcgggaagacttcgagcatttgttcggaataacccatgtattcctggacaccgaaattggggacccacagatcaaagtgcagcgctgcagccatgcagactggtgacaaatcggaaggaccgtgtgagccagtacgtacctgatacagcgaagcaaaatcggcaatccggcgcataccggtaattccgcctgcatgggtcagcgtggtgcggatataatcgatgagttgctcttcaatcagttgtttgcagtcccagatgctgttgaagacttcacccactgcgatgggtgtgacggtatgttggcgaatgagacggaagcattcctggttttctgcaggcgtcgggtcttccatccagaacatgcgataatcttcaatgcttttaccaaagcgcgccgcttcaataggcgttaagcgatggtgcatgtcatgcagcaaatgttcattaaaaccaaacttgttacgtaccgcgtcaaacaatttcggcatgaaatcgaggtatttctccgtcgaccacagctgctcttccggccactgtcctttggttgcgggttcataagccagacctttacctttcgacatgccgtaggtggttttcataccagggattccgcactgcacgcggatggctttgaatcccagctcctgatgacgggcataatcatccagagcttcatcaatactgtgaccggtggtatggcaataaaccatcaccccttcacgagacgcgccgccgagtaactggtaaagcggcatgttggcagctttggctttaatatcccacagcgccatatcaaccgctgaaatggccgacatcgtaaccggaccgcgacgccagtaagcacctttatagaaaaactgccagatatcttcgatacggtgcgcatcgcgaccaataagctgcggacaaaggtgatcctgcaaataagaggccacggaaagctcacgtccattgagggtggcatccccaaggcccgtaataccgtcctcagtggtgatttttaatgtgacgaaattacgccccggacaggtaacaaaaacttcagcctttacgatcttcatgttcgattccttgcatcgcttgtcgtgatgcatgaaatctacgcaactgagctactaccatacaagtatgaagatcgaaaaaagccggagtgatcacaaaaaaaggcgtatatttgcgctgtgaatggttgacaaaagatgaaatagaataccttttgtcagctgacacttcctcttatcttattgataaaatggatttatgttcctacgtgcgcccccagcccgcaacaatgatcaacatgccgcaaagcgcaatcaacgcacccgtccagtcataaagagtcagtttcacgccatccacaacgcgcagccacatcaacgccgtgcagacataaacgccaccataagccgcgtaaacacgcccactcgccgctggatgcaacgttaacaaccagacaaacagcgccagtgaaatccccgccggaagcaacagccagatactggcgtttcgttttaaccacaaccagggcagaaagcatccaataatttcacacagcgcagtagcaaaaaatagtaacgttgttttaatcatctttgtcacttattgacatcatgtatagttatagggcgacataatatcatcaatataaacaccctcctggtacgttttgcgttcgcagtggatggtgtagaatctcctttaatcattcatacagggaatgaattatgaaaatcactctcagcaaacgaatcggcctgctcgcttttctgctgccttgcgcactggcactgagcacaactgttcatgccgaaactaacaaactggtgattgagtctggcgacagtgcacaaagccgccagcacgccgctatggaaaaagagcaatggaatgacacgcgcaatctgcgtcagaaagtgaataaacgcactgaaaaagagtgggataaagccgacgccgcttttgataaccgcgataaatgtgagcaaagcgccaacatcaatgcctactgggagccaaatactttgcgctgcctggaccgtcgaactggccgcgttattaccccctaacctgttattgatttaaggaatgtaaggacacgttatgccaagcgcccacagtgttaagctacgcccgctggagcgtgaagatttacgctatgtacatcaactcgacaataacgccagtgtgatgcgttactggtttgaggaaccctacgaagcctttgttgaactctctgatctgtatgataagcatattcacgatcagagcgaacgacgctttgtggtggaatgtgacggcgaaaaagccggtctggtggagctggtggaaattaaccatgtacatcgccgggcagaatttcagataattatctccccggagtatcaggggaaaggtctggcaacccgtgccgccaaattagcaatggactatggcttcaccgttctcaatctctataagctgtatctgatcgtcgataaagagaatgaaaaagcgattcacatttaccgcaagcttggctttacggttgaaggtgaattgatgcacgagttctttattaatggtcaatatcgtaatgccattcgcatgtgtatattccagcatcagtatctggcagagcacaaaacaccgggtcagactctcctgaagccgaccgcacaatagcattaataataatcgatcgtatttttgatggtgtaaacccgttcgacggcgggttttactccttcatcaacaatgatcagctgacagtccaccggattggcgtgactgtcatattcacagctctgttttacattaccaactcgttgattattcagtaaagtaaccgctgtgtaatctaattttttgatcggatccgttgatggcgtggcgctgacagataatgttttgtcgttacttttcgtggttttacccagcggataaccctgatcatcatagcgatattccatctgcatttgtttgctgctggctttaatcacgaagccattatcatcggtttcccaactcaccccggcagaaggtaattctgctagctggcattttccctgtaaacgtactctcttctccagcgtctcggcatcacggtaataattggcgtccagtaccagagcgaccacggtattattttccagatccagtaattcgagtgaatcaaaacagccttcttccgacaaagtcccagaaacacgtttcgtcacttcaccttgctcatccattaatgtctgagtgaaatcttttaccggaccacgcagcggatcaaaatcgaattcattagagaaactggccatctcaggggtaaatgaaagtgttacctctgtgcggtcacatcctgtgaggaatatcgcgagtaagcatggtagtaatttgtatttcacaacagtcaccagagagtagagatgattctcaatcatagtagcaaatacagtactttacacgttaaatgctatgcttaaagaagttatcttcgcgtaaggagcttatgatgaaactctcaacctgctgtgccgcgcttctgctcgccctcgcctcacccgcggtactcgccgcgccgggatcctgtgagcgcatacagagcgatatatcacagcgcattatcaataatggcgtacccgaaagcagcttcacgttaagtattgtacccaatgaccaggttgatcagcctgattcccaggtcgtcgggcattgtgctaatgatacgcataaaattctctacacccgcaccaccagcggtaacgtctctgctcccgcgcagtctacccaggatggcgcgcctgccgaaccgcagtaatacattatcgacggaacgccggatacgacacatccggcgatttgaacatacaacataatcccaccttattactcatacccttctattgatatggattaataattcttaacccaaaatgggtagactccctctattgttagcgcgctaaatattcaatatataaacatttatataacgataaagaacagggagtgagttatgtccaaaaatgaccgaatggtgggcatcagccgcagaacactcgttaaatcaaccgcgataggttctctggcgctggctgcaggcggtttttctttaccgttcaccctgcgcagtgcagcggcagcggtacaacaggccagcgaaaaagtgatctggggtgcctgttccgtcaactgtggtagccgctgtgcacttcgtctacatgttaaagataatgaagtgacctgggtggaaactgacaataccggcagcgatgagtacggcaaccatcaggtacgcgcctgtttgcgcggtcgctccatccgccggcgtattaatcatcccgatcgcttgaattacccaatgaaacgcgtgggtacacgcggtgaaggcaaattcgaacggattagctgggatgaagccctggatactatcgccagtagcctgaaaaaaaccgtcgaacaatatggcaatgaggctgtatatattcagtactcttcggggattgttggcggcaatatgacccgctcttcgccatcagcctcggcggtcaaacgcctgatgaactgctacggcggttcactcaatcagtatggctcctacagcaccgcgcaaatttcctgtgccatgccctacacctacggcagtaatgatggcaacagcaccacggatattgaaaacagcaagctggtcgtgatgtttggtaacaacccggcagaaacccgcatgagcggcggtggcatcacttatcttcttgaaaaagcgcgcgagaaatcgaacgccaaaatgattgttatcgatccgcgatataccgatacggctgctggtcgtgaagatgaatggctccctattcgcccgggcaccgatgccgcgctggttgcgggtattgcctgggtattgattaacgaaaatctcgttgatcaaccttttctcgataaatactgcgtcggctatgacgaaaaaaccttacccgcagatgcacccaaaaatggtcactataaagcctatattcttggtgaaggtgatgataacacagcgaaaacgccgcagtgggcttcgcaaattaccggtatcccggtagaccgtatcatcaaactggcgcgtgaaattggcacagcaaaacccgcttatatctgccagggctgggggccgcaacgccaggcaaacggcgaactgactgcacgcgctattgctatgttacctattttgacgggcaatgtcggcatcagcggcggaaatagtggcgcgcgtgaatcgacctataccattaccatagaacgcctgccggtgctggataatccggtcaaaacgtcaatctcctgcttcagctggacagatgctatcgatcatggtccgcaaatgacggcaatccgcgacggcgtccgcggcaaagataaactggatgtgtccattaagttcatctggaactacgcgggaaataccctcgttaatcagcattctgacatcaacaaaacgcatgaaattctgcaagacgaatcgaaatgcgaaatgattgtggtcatcgaaaactttatgacctcatcggcaaaatatgccgacattctgctgccagacctgatgaccgttgagcaggaagatattattcctaacgactacgccggtaacatgggatatctcattttcctccagccagtcaccagcgaaaaattcgaacgtaaaccgatttactggatcctgagtgaagtcgcgaaacgtcttggacctgacgtctatcaaaagttcactgaaggtcgcacgcaggaacaatggttacaacatctgtacgccaaaatgcttgccaaagatccggcgttaccgtcttacgacgaactgaaaaaaatgggtatctataagcgtaaagatcccaatggtcattttgtcgcctacaaagcatttcgtgacgaccccgaggcaaatccacttaaaacaccttccggtaagattgaaatttattccagcaagctggcggaaattgcccgtacctgggaactggaaaaagatgaagtgataagcccactgccagtttatgcctctacctttgaaggctgggactcccctgaacgtagaaccttcccacttcaactgtttggtttccattacaaatcccgtactcactcgacctacggcaatattgatctcctgaaggctgcctgccgtcaggaggtgtggatcaaccctatagatgcgcagaaacgtgggattgccaacggcgatatggtgcgggtgtttaaccatcgtggcgaagttcggctaccagccaaagtgacaccacgcattctccctggggttagcgctatgggccagggagcctggcacgaggccaatatgtctggcgataaaatcgaccatggcggctgtgtgaatacgctaaccactctgcgcccttcaccactggcgaagggaaacccgcagcacactaatctggtcgagatcgaaaaaatataacccacgacaaccataaattctggcatgacattttgtttgaaaagcaataagtgagtaatgatgaaaatccataccacagaggcgctcatgaaggctgaaatcagccgtagaagtctgatgaaaacctccgcacttggcagtcttgcgctggcaagcagtgctttcactctgccattttctcaaatggtccgggcggcagaggctccggtagaagagaaagcggtctggagttcctgcaccgttaactgcgggagccgctgtctgttacgtttgcatgtgaaagatgacaccgtgtactgggtggagtctgatacgacaggtgacgacgtctacggtaatcatcaggttcgcgcgtgtttacgcgggcgctctatccgccgacggatgaatcatcctgataggttgaaatatcccatgaagcgcgtcggcaagcgcggtgaaggtaaatttgaacggataagttgggacgaagccctggataccatcagtgataatcttcggcggatcctaaaagattacggcaatgaggctgtacatgtcctgtacggaacaggcgtagatggcggaaacatcaccaactcaaacgtcccgtaccgtctgatgaactcttgcggtggttttctcagtcgctatggcagctacagtaccgcacagatcagtgccgcaatgagttatatgttcggtgccaatgatggcaacagcccggatgatatcgccaatacgaaactggtcgttatgttcggaaataacccggcagaaacgcggatgagcggcggtggtgtcacttactacgtcgagcaagcccgcgaacgttcaaacgcacgcatgatcgtcatcgatccacgttataacgacacagctgccgggcgtgaagatgaatggctgcccattcgcccaggcaccgatggcgcactggcctgtgcgattgcctgggtactgattactgaaaacatggtcgatcagccatttctcgacaaatattgtgttggttacgatgaaaaaactctgcccgccaacgcaccacgtaacgcgcattataaagcctatattctgggcgaagggcctgacggcatagctaaaacgccggaatgggcagcaaaaatcaccagcatcccggcagaaaaaattatccagttggcacgagagatcggttcagcaaaacctgcttatatttgtcagggttgggggccacaacgacattccaacggcgagcaaacgtcccgcgctattgccatgctttccgttctcaccggtaacgtcggcataaacggcggcaactcaggtgtacgcgaaggtagctgggatctgggggtagaatggttcccgatgcttgagaaccctgttaaaacgcagatttccgtctttacatggacagatgccatcgaccatggtaaggaaatgaccgcgacccgtgatggtgttcgtggaaaagaaaaactggatgtccccatcaagtttttatggtgctacgccagtaacacattgatcaatcaacatggcgacatcaatcacacccatgaggtgcttcaggatgacagcaagtgcgagatgattgttggcattgaccacttcatgacggcctcggctaagtattgcgatatcctgttgcccgacctgatgccaacagagcaagaagaccttatctctcatgaatctgcagggaatatgggctatgtgatcctcgcccaacccgcaacctctgcaaaatttgaacgcaaacccatctactggatgctgagtgaagtcgccaaacgcttaggaccagacgtttatcaaacctttactgaaggtcgcagtcagcatgaatggatcaaatatctccatgcgaaaacgaaggaacgtaaccctgagatgcccgactacgaggagatgaaaacgaccgggatctttaagaaaaaatgcccggaagaacactacgtcgctttccgcgcattccgtgaagatccccaggcaaacccgttgaaaacaccttcggggaaaatcgaaatttattctgaacgactggcgaagattgcggatacctgggaattgaaaaaagatgaaattattcatccccttccagcttatacgccaggttttgatggctgggacgatcccctgcggaaaacctatccactgcagttaacgggcttccactacaaggcgcgtacccactccagctacggcaatattgatgtgttacagcaggcctgcccacaagaggtgtggatcaaccccattgatgctcaggctcgcggtatccgtcatggcgataccgtgcgggtatttaacaataatggagaaatgctgattgccgcaaaagtgactccgcgtattctgcctggcgttaccgccatcgggcaaggtgcgtggcttaaagcggatatgtttggtgaccgggtcgatcacggcggcagtatcaatattctgacctctcaccgcccttcaccgctggcaaagggaaacccgtcgcacagcaatcttgtccagatcgaaaaggtttaaggagtagcccatgaccacacaatatggattttttatcgattccagccgctgtactggctgtaaaacctgcgaactggcgtgcaaagattttaaagatcttggcccggaagtcagtttccgccgtatttatgaatacgctggcggcgactggcaggaagataatggcgtctggcaccagaacgtgttcgcttattatctctccatctcctgtaaccattgcgatgaccccgcatgtacaaaagtctgccccagcggcgcaatgcataagcgtgaagatggctttgtggtggttgatgaagatgtttgtatcggctgccgctactgccacatggcttgtccgtacggcgcaccacagtacaatgctgaaaaagggcacatgacgaagtgcgatggttgttattcgcgcgtcgccgaggggaaacaacccatatgcgtcgaatcctgcccgctgcgtgcacttgagttcggtccaattgaagagctgcgccagaagcacggcactctggctgccgtcgcgccactgccgcgcgcgcatttcacaaaacccaatatcgttatcaaacctaacgccaacagccgcccgaccggcgataccactggttatctggctaatccggaggaagtgtaaaatgggaaatggatggcatgaatggccactggttatctttaccgtattgggtcaatgcgtagtaggcgcgctgattgttagcggaattggctggttcgccgccaaaaatgacgcagaccgtcagcgtattgtccgtggcatgtttttcctctggctgttgatgggcatcgggtttattgcctctgtcatgcacctgggatcgccactgcgagcgtttaactcgctgaatcgaatcggagcttctggtctgagtaacgagattgctgccggttccatattttttgccgttggcggactatggtggctggtggcggtcatcggtaaaatgccgcaagcgttggggaaactctggttacttgtcagcatggcgctcggcgtcattttcgtctggatgatgacctgcgtgtatcaaatcgacaccgtgccaacctggcataacggttacactacgctggctttcttcctgacggtattgttgagcggtccaatacttgctgccgcaattctgcgggcagctcgcgttacatttaataccacaccatttgccatcattagcgttctggcgctgatcgcttgtgccggggtgattgtgctgcaaggtttgtctctggcgtctattcactcatccgtgcaacaagccagcgcactggtaccagattacgcctccttacaggtctggcgtgtggtattgttatgcgcaggtcttggatgctggctttgcccgctcattcgtcgccgtgaacctcacgttgccggacttattctggggctaatcctcatacttggcggtgagatgatcgggcgtgtgctcttttatggcctgcacatgacagtaggaatggctattgcaggttaacaaatcggtgcggggcaacccgcacatttcaggatgttaggaatgacccatttttcacagcaagataatttttctgtcgcggcgcgcgtgttgggcgcgctgttttattacgctccagagagtgcggaagccgcacctctggttgcggtactcaccagtgacggctgggaaactcagtggcctctaccagaagcgtcattagcgccgctggtgacggcttttcagacacagtgtgaagagactcacgcccaggcctggcagcgtttgtttgtcggcccgtgggcactgccgtctccgccgtgggggtcggtctggctggatcgcgaatctgtgctgtttggcgattcaacattggcacttcgtcagtggatgcgcgagaaaggcattcagtttgaaatgaagcaaaacgaaccggaagatcattttggttcactgctgttgatggctgcgtggttggcggaaaatggtcgccagacagaatgcgaagaattgctggcatggcacctttttccgtggtcaacacgttttcttgatgtttttatcgaaaaagcagaacaccctttctaccgtgcactgggtgaactggctcgcttaacgctggcgcaatggcaatcacaactgttaattcctgtcgcggttaaaccgctgtttcgataggatcaccgtaatattgccggatggtgacgattacgcgcaatccggcaataataggttacagtgtcacgtttttttatctcttaaagcacgcactgcttttgcggctggcctcttttgccgcaaaatagtcgcccgtgtttcattgcacatttctgctcatgcatcatctacacatctatccggatctgcgcactatgttccgccgtctgcttatcgcaacagtcgtcggtattctcgcggcctttgccgttgccgggtttcgtcatgcgatgctgctactggagtggttgttcctcaataatgactccggcagtctggtcaatgcagcgacaaacctttccccctggcgacggttgctaactccggcgctcggcggactggcggcgggtttgttgctgatgggctggcagaaatttacccaacaacgccctcatgcgccgaccgattacatggaagcgttgcaaaccgatggacagttcgattacgcagcaagcctggttaaatcgcttgcctcgctgctggtagtaaccagcggcagtgcaattggtcgcgaaggtgcgatgattcttttagctgcccttgccgcctcctgttttgcccaacgttttacgccacgccaggagtggaaattatggatcgcctgtggggccgcggcgggaatggctgcggcctatcgtgccccgcttgctggcagtttatttatagccgaagtgctgtttggcactatgatgttggcctctctcggcccggtgattatttccgccgtcgtggcattgctggttagcaatctgattaatcatagcgacgcgttactctacaacgtacaactctcagtgacggttcaggctcgtgactatgcgctgattatcagtacaggtgtgctggcaggtctgtgcggaccactgttgttaacgttaatgaacgcctgtcatcgtggatttgtgagtctcaaacttgcgccgccctggcaactggcactaggcgggttgatcgtgggtctgctttccctgttcacacctgcagtgtggggcaacggctatagcaccgtacaatcctttttaaccgccccaccactgttaatgatcattgccgggatcttcctttgtaaactgtgtgccgtgctggcgagtagcggttccggcgcacccggtggtgtctttacaccgacgctatttatcggtcttgccattggcatgttgtatggtcgtagcctgggattatggttccctgatggcgaagaaattacacttttactcggattgaccgggatggcgacactgttggcggcgaccacgcacgcgccgattatgtcgacgttgatgatatgtgaaatgaccggggagtatcagctactccccggtttattgattgcctgcgtaattgcgtaggtaatttcgcggacgttacaccgtgactctatctaccgccagcacactgcgcagcatagctaagcggatgtattgccccagttcacgctgttcggcgcgcggcagataaggcagttcaccaatgagcggtgccggaagttttttacccagcacatcaatgatttccgcataatgcgccagtcctgggttgattcggttagccacccagccaatgagcggcagcccgtcgttggcgatcgcctgagctgttagcagtgcatggttaatgcaaccttcctgaataccgacaaccatcaacaccggcagttgttcctgcactacccattcagagagtggacgcaaatcattcatcagactgcgccagccgccagtcccttctaccacgacatgatcgactttttcggtcaggtttgccaggccgtttgaaatgagggtgtaattgattgggcaactgtgcgccacgctactttcttcttcgcttaacgcgataggattaactgcttcataaggcagttcgatggttgaaacactctgcaacaccagggcatctttattacgcagcccttcgggtgtctctttgctccccttcgctacgggtttatatcccgcaaccgtttttccctgggaggctaacgcttgtagcaatgcgcgggaaaccaccgttttccctacagaagtgtctgtaccggtaataaagaaacgcttcagcatcactaactccaccgttatgcttcacaaatataaaccaggaaaataattaaccttgaaagtctaagttatgctttcctggcccaaattgagatagcgcaaattttggtagaacagttaaaaaatgttaaccctgcaacagacgaatcaacaaagaaccgttatacatcgcgtcttttaccagtgcagcccctgccatcgtgccctggttagaaaactgagtactctcaacgctgatgtgctgactatacgcaggaagggcctgctgacggatgctgtctgagatgaccgggaagaggatatctgccgctttacttaacggtgagccaatcagtattttttgtgggttaaataaattcaccatgatggcaagaatgcgccctacatgcgcgcccaccccggtaatgatgtcttttgccagcagatcgccgcgcaatgccgcctgacacaatgagtccacggttaacggttgtccatgtaacatcgagctcatggattgattaagacgcagctgtgccagctcaagaatactgtccacactggcgatggtttcgaggcagccgtgattcccgcaataacagcgtttcccatacgggtcgacctgtgtgtggcctatttccacgagactactgctgcctgcgtgtagcagatgaccatcggtaatgacgcccgcccccacgttgtgatcgataaccacctgaatcacatcgcgcgccccgcgtgaggcaccaaacaaggcctctgccatcgtccatgcgctgatatcatgctgaatataaaccggtacgccggtatgctgctccagcgcctcgccgagcggcatctcttttacatcctcgtagaacggcatgcgatgtacaataccattttccgtatcaataattcccggcaaggttatggcaatcgaagttagacgctcaagttttttctggtggcgaataaaaaactgatcgatatgggaaatgatacgatccagcaatggcgagtcatcttttaacgccagttcctgcgactcttccaccaccagtttgctgctcagatcgcgcagagcaaggaaaatctccccgcgactaatgcgcagagaaagatagtgccaggcttcagtttcaaccaccagccccaccgccggacggccacggttccccgcttctttgatttccagctcttgcaccaggtgtgcttcgagcatctcacggacaattttagtgatactggcaggagccagctgcgccagacgggaaagatcgatacgcgagactggaccaagctgatcaatcaggcgataaaccgcgcccgcgttggtctgctttatttgatcaatgtgcccaggctggttttcagcaaccaccgcatactccctatattttcgcgctccgaaataatctgtaggctatggtgaagcacttcaatacgtgtcgtcaaatttttacttaggcatgtgattaacagcacatttttcgggctttttcgctgaaatttccctcacctgagagcattcagcagatgaatacgaaagtttcgcgcagctggactttgttcatgatgtttcggccagaccaaccacatttcagaaaccgcatcctcttctgcaatcggcacccagcgcatttcgttgagctgaacacgtttaaatgacgcaggcaaaattgaaacaccctgaccggcggaaaccagaccgatgatggtcattgcctcgcccacctcctgagtgatgacgggcgtcaaatggtaacgtcgcatcagcccgagaatatcgtcatacagccctgtcccgacgtgcggatcaaaaaagacgaagggttctttcgccagttcagccagcgttacattcgggttatttgccaggggatgatcgtgcgggatcatcgccataagcggttcatggacgatgactgcgtgttcaagcgtctccggtaacgctgtgttacgcagcaatcccatatccagcgttccttcaatgagcggagcgatttgctcacgagtgttcatttcgcgggtttgtaaatggacatcgggataatcacggcgaaacagcgataacgtatcagacaccgcccgaataaaaggagcggacgaagtaaaaccaatgcgcaactcccccgcttcaccctgatgcagtctttcagcgcgagcggcagcgtcatccaccatagacaggatttgccgactatctgcaagaaactgttttcctgctgccgtcagcaatacactgcgattggttcgtgccagcagtcgggcaccaatttgttgctccagcgcctgaatctgctgacttagcggcggttgcgaaatattcaggcgggcagcggcgcgcccgaaatgcagctcttccgcaacagcaacaaagtaacgcagatgacgaagttcaatattcatatttaaaacatcttatttgagattattaatatattagacagaacaattcgattttcctaacctatgtataagcctgatccacaggcatatttagcaaggatttcaagtgagccgtactacaactgttgatgacgctccggcaagcgacactgacaagcaaagcatttctcagccaaatcaatttattaaacgcggtacgccgcaatttatgcgcgtcaccctggcgctgttctctgccggactggcaacatttgcacttctctattgtgtgcagcctatccttccggtgctttcgcaggagtttggcttaacgcccgcgaacagtagtatttcactgtccatttccacggcgatgttggctattggtttgctgtttactggccccctatccgatgccattggtcgcaaaccagtgatggtcacggcgctactgttggcctccatttgtacgttactttcgacaatgatgaccagctggcacggcattttgattatgcgcgccttgattgggctttcgttaagtggcgtggcagctgttggcatgacttatcttagcgaggaaatccaccccagtttcgtggccttttcgatggggttgtatatcagcggcaactcaattggcggcatgagcggacgcttaattagtggtgtcttcacggactttttcaactggcgaattgctctggcggcaatcggttgtttcgcgctggcctcggcgttgatgttctggaaatccttccggaatcacgccattttcgcccgacttcgctgcgccctaagacgttatttatcaactttcgtctgcactggcgtgaccggggattaccgttattgttcgcagaaggctttttgctgatggggtcgttcgtcacgctgtttaattacatcggatatcggttgatgctctccccctggcatgtcagtcaggccgtggttggcttattatcgctggcttatttgaccggtacatggagctcacccaaagccggaaccatgaccacccgctacgggcgcggtccggtgatgttgttttcgacgggggttatgctgtttggtttactgatgaccttattcagctcgctgtggctgatctttgccggaatgttactcttctcagcaggattcttcgcagcccactcagttgccagcagctggattggcccccgcgcaaaacgcgctaaaggccaggcctcctcgctgtatctgttcagttactatctggggtcgagtattgccgggacgctgggtggtgttttctggcataactatggctggaacggcgtcggcgcatttattgctctgatgctggtcattgctctgctggtcgggacgcgtttgcatcgtcgtctgcacgcctgaaaaataagcccggactgcggtaactacacgtccggacttattgcttgctcaaaccaacgttaatagccatcctaaaatagacgaagcgccagccaattcccgcagcgcgtctagcgtcatcaggattataagtacccaaataaacggattcattttgctgtgtgtcatttattactgatgtgcagttattctaccgctttgtaagtagtaaaatagttaacccgatcaagactactattattggtagctaaatttcccttaagtcacaatacgttattatcaacgctgtaatttattcagcgtttgtacatatcgttacacgctgaaaccaaccactcacggaagtctgccattcccagggatatagttatttcaacggccccgcagtggggttaaatgaaaaaacaaattgagggtatgacaatgaaaaaagtattagctctggttgttgccgctgctatgggtctgtcttctgccgcctttgctgcagagactgcgaccacacctgctccgactgcgacgaccaccaaagcagcgccggcgaaaacgacacatcataaaaaacagcataaagcagcacctgcccagaaagcgcaggcggctaaaaagcatcataaaaatacgaaagctgaacagaaagcccctgaacaaaaagcgcaggcagcgaagaaacacgccgggaaacacagccatcagcaaccggcaaaacctgctgcacaacccgcagcgtaagttttcaacagtaatgctggcgcgccccctcgcgcctgaaaattacggtgctaagcgggtaacgtttagcaccgcctttagcggagggtagtatggtgggccgttatcgctttgagttcattcttatcatccttattttatgcgcactgattgccgcccgtttttatctttcctgactgtagttatctgattttactcccactttcatcccgtcccgtctatagtatttatgagggtttgcttttaataatcataattacccaccagagtgtgatatgcgtacaaccattgctgtagtgttgggtgcaattagtttgacgtctgcttttgtgtttgcagataaaccagacgttgccaaatcggcaaacgatgaggtcagcaccctgttttttggtcatgatgatcgtgtgccagtgaatgacacgacccaatcaccgtgggatgcggttgggcaactggaaacggccagcggcaatttatgtacggcgacgctgattgcacccaatctggcattaacggcaggacactgtttattgacacctccaaagggtaaagccgataaagcagtggcgctgcgttttgtgtcaaataaaggtctttggcgctatgacatccacgacatagaaggccgcgttgatccgacactgggaaagcggttaaaagcagatggggatggttggattgtacctcccgcagccgcgccgtgggacttcggattgattgtgctacgtaatcccccttctggcattacaccgttgccgttatttgagggagataaagccgcgcttactgccgcattaaaatcggctggccgtaaagtaactcaggcgggataccctgaagatcatctcgatacgttgtacagtcatcaaaactgtgaagtgactggctgggcgcaaacgtcggtgatgtcacatcagtgcgataccttgccgggtgacagcggttcgcctctgatgttgcataccaatgacggctggcaattaattggggtgcaaagttcggctcctgccgcgaaagatcgctggcgcgccgataaccgggccatttctgttaccggttttcgcgacaagctggatcaactgtcgcaaaaataatgttcaaacgctgcccgactgtgcgggcagcgtcttcatcaggcaagtttcaccatgatcattccagccaacagcaagaccaggccaatccagcctttacgatttaaccgttgaccaaacaagatccaacctgcggctaacgtggcggcaataccaaacccgccccacaatgcataagcgacagacaagtcgatcccttttacggcctgagaaagcgcactaaaggcagccagcaccgccgccagggagagcaagccaaatattttgcgacgaaagccgtcagaaaatttcaaaaagacgttagcaacgatttccagcacgattgccaatgccagccaggcggcgtgaacccattcaaactgcgccatggttcacctccagttcaggtttacgcgctttacgggtacctgatttgatcaacacaatcccggcgaccagggtggttaacccggcaattttcatcagcgataaactttcgtcgaataacaaaacgctaaacaaggtaataaataaaataccgataccttcccacagcgcataagctacgcctaaggcgatctttttaacggcgaaagagagaaatatatacgacagagaaatcatcaccagcattaaaataaagccgccatttccctcactgacgctcgcccatttcattgacagcgtaccggtaatttctgtagcaatagccaggcctaataaaatccaataaatatacattgtccttctcctgcaagagaattattttaattttcgcttaattcagcgaaaccaaagtaaagtggtcaagccccgcgcatagggcaagcttaggcagaagaaaggactaaagcgcgttgcgccagtgctgctcacctacgagcaagatagtggatgaggtacgaagatgggtaaatgttgaaaataacgtcctgaacaaattgtccataatattacaattatccgcagtgttgcttctcgtcatcgcggatgataattgtcctcggtagttgaacacgcctgatttgtatcatagcttaagaattaactcaaaatattttcacttctttacctgagcggtttgattttcgttatgatgacggagcgaaaaagacattattattagcaaaggaagaaaaaacggggacaagcatggcaaagccgatcatcacgctcaatggcctaaaaatcgtcattatgttgggaatgctggtcattattctctgcggtatccgttttgccgccgagatcatcgtgccgtttattctcgcattatttattgctgttattcttaacccgctggtgcaacacatggtccgctggcgagtgccgcgtgtactggcggtgtcgattttgatgaccatcatcgtgatggcgatggtgttgctattagcttatctgggttccgcgctcaacgagttgacgcggacgttaccgcaatatcgcaactctattatgacgccgctgcaagctcttgagccgttgttgcaacgcgtagggattgacgtctcagttgaccagctggcgcattacattgatccgaacgcggcgatgacgttgctcaccaacttattgacgcagttatctaatgccatgtcatcaatatttttattgctgctgacggtgctgtttatgctgctcgaagtgccacaattgcccggaaaatttcagcaaatgatggcgtgtccggttgaagggatggcggcgattcaacgtgcaattgacagtgtttctcattatctggtgctaaaaacagccatcagcatcatcaccggcctggtcgcctgggcgatgctcgccgcactcgatgttcgcttcgcttttgtctggggattgctggcctttgcgcttaattacatccctaatattggttcagttctcgcggcaatcccccctatcgctcaggtactggtgtttaatggcttctacgaagcgttgctggtgctggcgggatatctgctgattaatctggtcttcggcaatattctggagccgcgcatcatgggacgtgggctggggctttccacattggtggtatttttgtcgttgattttttggggatggttgttaggaccggtgggtatgctgctttccgtgccgttaacaattattgtcaaaattgcgcttgaacaaacagcgggaggtcaaagcatcgccgttctgttaagcgatctcaataaagagtgacggcctccgcagaggccgtcagggttacagagctttcaggattgcatccacgctggctttggcgtcaccaaacagcatgtgggtgttttccttgaagaacagcgggttttgcacaccagcatagccagtgttcatcgaacgtttaaagacaatcacgttctgcgctttccacacttccagcacaggcataccagcaataggactcttcggatcatcctgcgccgccgggttaaccgtatcgttagcaccaatcaccagtacggtatcggtatcagcaaagtcatcgttgatctcgtccatttccagcacgatgtcatacggtacttttgcttcagccagcaatacgttcatatgtccaggcaaacgccccgcaaccgggtggataccgaaacgcacgttgataccacgagcgcgcagtttctcggtaatttcagcgacaggatattgcgcctgcgcgactgccatgccgtaccccggagtaatgatcactgaatgggagtttttcagcagttccgctgtctcttctgcggtgatttcgcggtgctcgcccacttcctgatcatcgccagtagaagagccgtcggtgccgaaaccacccgcaataacgctgataaaggaacggttcatcgccttacacataatgtaagaaaggatagcgcccgaagaaccgaccagcgcaccggtcacaatcagcaggtcgttgctgagcataaagcccgcagccgcagccgcccagccggagtacgagttcagcatcgacaccaccactggcatatctgcaccaccgatggaggcgactaaatgccagccgaataccagcgcaatggcggtcattatcagcaatgccagcacttgcaggccgacgctatccgtgcgaacaaatacaatcagcagcaggaaggaaacgaccagagccgccaggttcattttgtgacggtttggcagcatcaacggtttagacgaaatcttgccacacagtttgccgaacgccaccaccgaacccgtgaacgttaccgccccgatgaagataccgaggaacacttccgtcaggtgaatattgaccagaatcggtgccattcccgcgtcatgatgcagataactgttaaagccaaccagcactgccgccagacccacgaagctatgcaggatcgccaccagttctggcatttcggtcatttcaactttcttcgccagacggataccaattgccccaccaatgaccatcgccagcaagatccagccaacattacccgtatccggtccaaaaatggttgcgattaacgcaatcgccatcccggcgataccgaagttgttaccctggcgagacgtttcatgtttcgaaagaccggccagactgaagataaacaggatcgcggcaacaatgtatgcagctgtaactaatcctccagacatatgttaccccttaatttttgcggaacattttcagcatgcgctgagtcacggtgaagccaccgaaaatattaatgctggctataagcaccgcgataaaactaaggaagctaacccagccgccctggccaatctgcaacagtgctccgacaacaataatccctgaaatcgcgttggtgaccgacatcaacggtgtatgcagcgcatgcgatacattccacaccacgtaataaccgacaacgcaggccagcgcgaaaacggtgaagtgcccaagaaactctttcggcgcaacgcttgccagccaaccgaaaaggatgattgccagcgccatcaatgcgtatttacgccacggtgagcaggcacatttttcctcagttttcacttccggtgccgctttttgtgccgcctgcggctgagctgatacctgaatcggcggtgccggccaggtaatttcgcccgcacggatcacggtcacgccgcgaatcaccacatcatcaaaatcaacagtgatattgccgtctttctctttgcacaacagtttcagcagattaacgaggttagtaccgtaaagctgtgaggattgcgtcggcagacggcccggaagatcggtataaccaatcactttgacaccattttccgtagtgaagatttcacccggcacggtgtattcacagttgccaccgttttgggctgccaggtcgacaatcacactgcccgccttcatggagtcaaccatttcacgggtaattagcttcggcgctggtttgcctggaataagcgcggtggtgacaatgatatcgacctcttttgcctgggcggcaaagagttccatttccgctttgatgaacgcgtccgacatcactttggcatagccatcgccgctgcccgcttcctctttaaaatccagctcgaggaattccgcgcccatactttgaacttgttctttcacttccgggcgggtgtcgaatgcacgcacaatcgcgccgagactgtttgctgcgccaatggcggccagacctgcaacacccgcaccaatcaccatcacttttgccggtggcactttcccggccgcagtaatttgcccggtaaagaagcgcccaaattcatgtgccgcttcaacaatggcgcgataaccggcgatgttcgccatcgagcttagtgcgtccagcgattgtgcgcgtgagatacgcggcacagaatccatcgccatcacggtcacgttacgttccgcaagtttttgcattaattccggattctgcgcaggccagataaaactcaccagcgttgtcccaggattcagtaacgcaatttcatcatctaacggcgcattgaccttcagaatgatctctgactgccagacgctattcccttctacaatttcagcgcccgcttgcacaaacgctttatcgtcaaaacttgccagttgacccgcgccgctctctaccgcgacggtaaaacccagtttcagcagctgttccactgtttttggcgttgctgcaacacgggtttcattggttaaccgttctcttggtatgccaattcgcatgatattcccttccatcggttttattgatgatggtttgcctgtgtcaggagccacacaagccgctcatgtacgagctaaatgttactccgttaaaataaattagtaacaaacgccctataacgtactgaaaattatgcctgtgatctagcgccaaaaatcagtatttcggcgtgaactcgcaaaatattaacgattcagccgtgatagtgggataaacaccttagaacgccggataaagactgataattgtcttcgacggtcgggtaaaacgagacatcgccccggcacgaatcactacttaacattaaattaacttatataattcagttgcttcagtagtaatgatgctgatacggctgttttttaagcatagacggtcatttgagcaggattaaaattggcttaaagaatgtgatatgaaaaatgacgcagacagttacaccgtttaaatgcaataatcagccacgtttctcgttaataacaataccagtacctggtttgcgcaaggcgaaggattatttttatgaagcttaagaacaccctcctggcgtcggcactgctttctgctacggcattctccgttaacgcagcaacagaactgacaccggagcaagcggcagcggttaaaccttttgaccgtgtagtggttaccggtcgttttaatgctattggcgaagcggtgaaagccgtttctcgtcgcgcagataaagaaggtgccgcctctttttatgttgtcgacacttctgattttggtaacagcggtaactggcgtgtggtcgctgacctctataaagccgatgctgaaaaagcagaagaaacaagtaatcgcgtaattaacggtgttgtcgaactgccgaaagatcaggctgttctgattgaaccgtttgacacggtcaccgtccagggcttctatcgtagccagccagaagtcaatgatgccatcaccaaagcggcaaaagcgaaaggtgcctactctttctacatcgttcgtcaaatcgatgccaaccagggcggcaaccagcgtattactgcattcatctataaaaaagatgctaagaaacgtatcgtccagagcccggatgtgatcccggcagattccgaagcaggacgtgcagctctggctgccggtggcgaagccgcgaagaaagttgagatcccaggtgttgcgactaccgcatcaccaagttctgaagtcggtcgtttctttgaaacccagtcatcaaaaggcgggcgttacaccgtcacgctcccggatggcactaaagtcgaagaactgaacaaagcgaccgcagcgatgatggtcccgttcgacagcatcaaattctctggcaactacggcaacatgaccgaagtctcctatcaggttgcgaaacgtgccgcgaagaaaggtgctaagtattaccacatcacccgccagtggcaggaacgtggtaataacctgaccgtcagcgcagatctgtataaataactattcagttactcctataaggcggcttgatgccgcctttcgcatttttagtcacaaatttccccgcgaccattgcatgcagacacatctcttcgtaaaatcccgcgcttcagtggcaaactccatttttatgcgttttgccctaatatttattcttcttatcacgttttaatcactggatatcgatggaaaagaaactgggactgagcgcactcaccgcgctggtattaagctcaatgctgggcgcgggtgttttcagtctgccgcaaaatatggcggcagttgccagcccggcagcactgctcatcggctggggtattactggcgctggcattttattgctggcctatgccatgctgatcctcacgcgcattcgtcccgaacttgacggcggtatctttacctatgcccgcgaagggtttggcgagctaatcggcttttgttccgcatggggatactggctgtgcgcagtcatcgccaacgtctcctatctggtgatcgttttttccgcgttaagcttttttacggacacgccggaattgcgcctgttcggcgatggtaatacctggcaatcgatcgtcggtgcatcggctttattgtggattgttcactttttgatcctgcgcggggtgcaaaccgctgccagcattaacctggtggcgacactggcaaaattgttgccgctgggtctgtttgttgtgctggcgatgatgatgttcaaactggataccttcaagctcgacttcaccggacttgcacttggcgtacccgtttgggaacaggtgaaaaacaccatgctgatcaccctgtgggttttcattggtgtggaaggtgccgtggttgtttctgcgcgtgcgcgtaataaacgtgatgttggcaaagcgacactgctggcggttctctccgctctgggcgtttacttgctggtaacgctgctttcgctgggtgtggtggcacgtcctgaactggctgaaattcgtaacccgtcaatggccggtctgatggtggaaatgatgggaccatggggcgaaatcatcatcgctgccggtttgatcgtttccgtttgcggcgcgtacttaagctggaccatcatggcggcagaagttccgttcctggctgccactcataaagcattcccacgcatttttgcgcgccagaacgcacaagctgcgccatccgcctcactgtggttgaccaacatctgcgtgcaaatttgtctggtactcatctggctgaccggttccgattacaacacgttgctgaccatcgcctcagaaatgattctggtgccctatttcctggtcggcgcgttcttgctgaaaatcgcaacccgtccactgcataaagcggtaggtgtcggtgcctgcatttatggcttatggttattgtacgcctctggtccaatgcacttgctgttatccgttgttctgtatgcgccgggctgctggttttcctgtatgcgcgcaaaacgcatacacatgataatgtactgaaccgtcaggaaatggtgctgattggcatgctgttaattgcctcagttccggcgacctggatgctggtgggataacgttcatcccatcgttggatagcaaaggagataacgatgggtaaagcccagcccttgccaatattaattactggcggaggtcgtcgcatcggcctcgccctcgcctggcatttcattaatcaaaagcaaccggtgattgtcagctatcggacgcactatccagccattgatggactgattaaggcaggtgcgcagtgtattcaggctgatttttcgaccaacgacggtgtgatggcgtttgccgatgaagtactaaaaagcacccatggtctgcgtgctattttgcataacgccagtgcgtggatggcagaaaaaccaggtacaccactggccgacgtactggcttgcatgatgcagatccacgttaataccccatacctgctcaaccatgcgctggaaagattactgcgtgggcacggacacgccgccagcgatatcattcactttaccgattatgtggtggagcgcggtagcgacaaacatgttgcgtatgctgcaagcaaagcggcactggataatatgacccgctcgtttgcccgcaagctggcaccggaagtgaaagtgaattctattgcgccatcgctgatcctgtttaatgaacatgatgatgccgaatatcgacaacaggcgctgaataaatcactgatgaaaaccgcgcctggcgagaaagaagtgatcgacctggtcgattacttacttaccagttgctttgtcaccggacgcagtttcccacttgatggcggtcgtcatctgcgttaatgcagctttatccagcatataatcaacacccatgcgcttatcccccaacacgcaacagaaccaacaaaagcggcgggcaagcgcatcattccggtgaaataccacagcgacaccaggtaaacaaaatagggaataatcgaccacatactaaaaatgatggttgcgcgtaaggcttcaatgccgcgttcgctggcaacaatataatgcgcgataagcgcaaaggtcgggaaaagtggaatcagcccggcgatataataatttttcgtttttgctaaaacaccaatcaacagcactaccagcgcaccgagcgcggctttgattaccagccccatttttttaccttaacacttccataacaagtcatcagtagaatacctgatgaaaacttgtttagaaacgattgatagtaagtaaaaacagcgcggtgtattgtgacgtttttatatctaccgtgaatgttatgaacactatcgtatttgtggaagatgatgcggaagtcggttcactgattgccgcgtacctggcaaaacatgatatgcaggttaccgtagagccgcgcggcgaccaggccgaagaaaccattttgcgagaaaatccggatttggtgttactcgacatcatgctaccaggcaaggacggcatgaccatttgtcgtgatttacgcgcaaagtggtctggaccgattgttcttctaacctctctcgatagcgatatgaaccacatcctggcactggaaatgggtgcctgcgactatattctcaaaacgacgccccctgctgttttgctagcgcgtttacgtttgcatttgcgtcagaatgagcaagccacactgagcaaaggtcttcaggaaacgtctctgactccctacaaagccctgcatttcggcacgttgaccatcgatcccatcaaccgcgtagtcaccctggctaacactgaaatctcgctctcgacagctgatttcgaattattgtgggaattagctacccatgccgggcaaatcatggaccgcgatgcattgctgaaaaatttacgcggcgtcagttatgacggactggatcgtagcgtggacgtggctatttcgcggttaagaaaaaaactgctcgataacgccgcagaaccttatcgcattaaaactgtgcgtaacaaaggctatctttttgcgcctcatgcatgggaataagcgatgaaaaaactgtttatccagttttacctgttattgtttgtctgcttccttgtgatgtctctgctggttgggttggtgtacaaatttaccgccgaacgcgcgggcaaacagtcgctggatgatttgatgaacagttcgctgtatctgatgcgcagcgaattgcgtgagatccccccacacgactggggtaagacgctgaaagagatggatttaaatctctctttcgatctgcgtgtcgagccattgagtaaataccatcttgatgatatttccatgcaccgactgcgtggcggcgaaattgtcgccctggacgatcagtacacgtttttgcagcgtatcccgcgcagccactacgtgctggcagttggtcctgttccttatctttattatctccatccagatgcgattgctggatatcgccctgatcgcttttattgctatttccctcgcctttccggtgtttatctggatgcgtccgcactggcaggatatgttaaaactggaagcagcggcgcaacgatttggcgatgggcatctcaatgagcgtatccactttgatgagggttcgagctttgaacgacttggtatcgcatttaaccagatggcggacaatatcaacgccttgattgccagcaaaaaacagcttattgacggtatcgctcacgaactgcgaacaccgttagtgcgcctgcgttatcgactggagatgagcgataacctgagcgccgccgaatcccaggcgttgaatcgtgatatcagtcaacttgaagctttaattgaagagctgctgacttatgcccgactcgatcgcccacaaaacgagcttcatcttagcgaaccagacctgccgttgtggctgtcaacgcatctggcagacattcaggcagtaacgcccgataaaacggtacggattaaaacgctcgcgcaaggccattatgcggcgttggatatgcgcttaatggagcgcgtgctggataatttgctcaataacgccctgcggtactgccattcaacggttgaaaccagcctgctactgtcggggaatagagcgacattaattgttgaggatgatggcccagggattgccccagaaaaccgcgaacatatctttgaaccttttgttcgcctcgatcccagccgggatcgctcaaccggcggctgcgggctggggctggcaattgtccactctatagcactggcaatgggcggtacggttaattgtgacaccagcgaactgggtggtgctcgcttctcgtttagctggccgttatggcataacatcccgcaatttacctctgcctgacactacgcgcacgatggtcaagtcaccacgactgtgctataaaataagtatgttgtaactaaagtggttaatattatggcgcgttacgatctcgtagaccgactcaacactacctttcgccagatggaacaagagctggctgcatttgccactcatcttgagcaacacaagctattggttgcccgcgtgttctctttgccggaggtaaaaaaagaggatgagcataatccgcttaatcgtattgaggtaaaacaacatctcggcaacgacgcgcagtcgctggcgttgcgtcatttccgccatttatttattcaacaacagtccgaaaatcgcagcagcaaggccgctgtccgtctgcctggcgtgttgtgttaccaggtcgataacctttcgcaagcagcgttggtcagtcatattcagcacatcaataaactcaagaccacgttcgagcatatcgtcacggttgaatcagaactccccaccgcggcacgttttgaatgggtgcatcgtcatttgccggggctgatcacccttaatgcttaccgcacgctcaccgttctgcacgaccccgccactttacgctttggttgggctaataaacatatcattaagaatttgcatcgtgatgaagtcctggcacagctggaaaaaagcctgaaatcaccacgcagtgtcgcaccgtggacgcgcgaggagtggcaaagaaaactggagcgagagtatcaggatatcgctgccctgccacagaacgcgaagttaaaaatcaaacgtccggtgaaggtgcagccgattgcccgcgtctggtacaaaggagatcaaaaacaagtccaacacgcctgccctacaccgctgattgcactgattaatcgggataatggcgcgcgcgtgccggacgttggtgagttgttaaattacgatgccgacaatgtgcagcaccgttataaaccacaggcgcagccgcttcgtttgatcattccacggctgcacctgtatgttgcggattaacgcccggctttcatactgccgaccatctgttctggccgtacccagctatcaaactcggcttcgctaagataccccagcgcaagggccgcagcttttaaggtcagcccttctttatgcgcttttttggcgatctccgcggctttgtcataaccaatgtgggtgttaagcgcagtcaccagcatcagcgattcattgagtaattgattgattcgctcacgattcggttcaatacccactgcgcagtgtttgttaaaactttccatgccatctgccagcaagcgcaccgattgcaggaaattgtggatcaccattggacggaagacgttcagttcaaagttaccggaagcgcccccatgttgatcgccacgtcgttccccatcacctgacagcagagcatggttaatgcctcacactgtgttggattcactttccccggcatgattgagctgcccggctcattttccgggattgagatttcaccaattccgcagcgcgggccagaggccagccagcggacatcattggcgattttcatcagtgacgcagccaaccctttcaacgcgccgtgcgcctgaaccagggcatcacaggtcgcaagcgcttcaaatttgttcggcgcggtaacaaacggtgcacaggtaatgactgccagttcatctgctacgcgacgcgcatactccggatgggtatttagtccagtacccaccgctgtaccgccaagagccagttccgctacgtgaggcaggctgtattcgatatgtttgagattatgctcgagcatcgctacccagccggaaatctcctgccctagtgttagcggcgtggcgtcctgcaagtgggttcgaccgattttgacgatatcggcaaatgcacgcgatttttcactcagcgtctgtgtcagggttttaagctgcggaatgagttgcttgcgcagcgccagcagcgccgcaacgtgcatcgccgtcggaaagacatcgttggaactttggcttttgttcacgtcgtcgttagggtgaactttacgttccatcccgcgcacgccgccgagtaattcactggcccggttagccagcacttcgttcatgttcatgttactttgcgtgccggagccggtctgccagatagccagcgggaattcgtcgtcatgctgtcctgccagtacttcatccgccgcctgccgaatggcgctcgctttctcttcagacaacaagcctaaatcttcattaacttttgccgctgcgcgcttggttagcgccagcgcatgaatcagtgaggtgggcattttctccgtcgaaatgcggaaatgctccagcgagcgttgagtttgtgcgccccacagcttatctgccgggacatcaatcgcccccatcgaatctttttcgctgcgtactgtattcatggcctgctcctcacctgtttaattttttctttctgttttgctttcgttaagcaacttttagctcacttattatttaccatttgataacaaatgtttggtctttcgtgccatgtaaaaaaaccgccccgaagggcggctctgtttatttcacacagcgagtgcactgtgtgagttgtatctgctggaagaagtcatttcctttatcatccacaaggataaacgccgggaaatcttccacttcaattttccagatggcttccattcccagttccggatattcaacacattccaggctcttaatacttccctgcgccaatacagcggccggaccaccgatactgccaaggtagaagccgccgtgttttttacaggcatccgtcacctgctggctgcggttgcctttcgccagcatgatcatacttccgccctgcgcttgcagttgatcgacataagaatccatccgtccggcggtcgttgggccaagagaaccggaggcataaccttccggcgttttggccggacccgcgtagtaaatcggatgatctttaatgtactgcggcagcccttcaccgttatccatccgctctttcagtttggcgtgagcaatatcacgaccgacgataatcgtgccgttaagcgataagcgtgtagaaacgggatactgcgacaactgtgcgaggatctctttcatcggacggttaaggtcaacgcacaccgcttcgccttctcccgctttgcgcagctcttccgggatatatttgcctgggttatgttccagtttttcgatccagatcccctgacggttgatcttcgctttgatattacggtcagcagagcaggagacgcccataccgaccgggcaggatgcgccgtgacgtggcaggcgaatcacgcggatgtcgtgagcgaagtatttaccaccaaactgcgcacccagaccaagattttgcgcttcgatcagcaattctttttccagttccacatcgcggaacgcctgaccgtgctcattcccttccgttggcagttcatcatagtatttagcggaagccagtttgaccgttttaaggttcgtttctgcagaagttccaccaataacgaacgcaatatgatacggaggacaggccgccgtacccagcgtgcgcatcttctcaaccaggtaatttttcagtttccccggcgttagtaacgctttggtttcctgatagagatacgtcttgttagccgaaccgccacctttggcgatacagaggaatttgtactcgtcgccatcaacggcataaagatcgatctgcgctggtagattggtgccggtattcacctctttatacatatccagcggcgcgttttgcgagtagcgcagattatcttcgatataagtgttatagacaccgcgtgccagcgccgcttcatcaccgccaccggtccatacacgctgcccttttttaccaacaataatcgcggtgccggtatcctgacaggttggcagaacgcctttcgccgcgatgtcggagttgcgcaggaattgcagcgccacatatttatcattttcgctggcttccgggtcacgcagaatgtcggccacctgttgttggtgagccggacgcagcataaatgacgcatcatgaaatgcctgacgcgccaacagagttaacgcttcgggtgcgactttcaaaatctcctgcccttcaaattcagatacgctaacgtgttcgctggttagcaggtaatactcagtatcatctttttgagtggaaaaggagcctgataatgaaagggtttgtttgacattgttctctcacttactgcctggtttggttatgctctgggcgggtgttccgttgccctgttaaaagcgagtaacaatatcctacacacttttttaacaaaaactgagactagtacgactttttgcggctccaggttacttcccgtaggattcttgctttaatagcgggattaatttccacattaaaacagggattgatcatgcaaaaactcattaactcagtgcaaaactatgcctggggcagcaaaacggcgttgactgaactttatggtatggaaaatccgtccagccagccgatggccgagctgtggatgggcgcacatccgaaaagcagttcacgggtgcagaatgccgccggagatatcgtttcactgcgtgatgtgattgagagtaataaatcgactctgctcggagaggccgttgccaaacgctttggcgaactgcctttcctgttcaaagtattatgcgcagcacagccgctctccattcaggttcatccaaacaaacgcaattctgaaatcggttttgccaaagaaaatgccgcaggtatcccgatggatgccgccgagcgtaactataaagatcctaaccacaagccggagctggtttttgcgctgacgcctttccttgcgatgaacgcgtttcgtgagttttccgagattgtctccctactccagccagtcgcaggtgcacatccggcaattgctcactttttacaacagcctaatgccgaacgtttaagcgaactgttcgccagcctgttgaatatgcagggtgaagaaaaatcccgcgcgctggcgattttaaaatcggcgctcgacagtcagcagggtgaaccgtggcaaacgattcgtttaatttctgaattttacccggaagacagcggcctgttctccccgctgttactgaatgtggtgaaattgaatcctggcgaagcgatgttcctgttcgctgaaacaccgcacgcttacctgcaaggcgtggcgctggaagtgatggcgaactccgataacgtgctgcgtgcgggtctgacgcctaagtacattgatattccggaactggttgccaatgtgaaattcgaagccaaaccggctaaccagttgttgacccagccggtgaaacaaggtgcagaactggacttcccgattccagtggatgattttgccttctcgctgcatgaccttagtgataaagaaaccaccattagccagcagagtgccgccattttgttctgcgtcgaaggcgatgcaacgttgtggaaaggttctcagcagttacagcttaaaccgggtgaatcagcgtttattgccgccaacgaatcaccggtgactgtcaaaggccacggccgtttagcgcgtgtttacaacaagctgtaagagcttactgaaaaaattaacatctcttgctaagcttattaaaggcttataacaccttcaggcggccagtccgcctgatttcattttatggataatcattatgaataaatcgctggtagcggtaggcgtcattgttgcgctaggcgtagtctggacaggcggcgcatggtatacaggcaagaagattgaaacccatctcgaagacatggtcgcgcaggcgaacgcgcaactcaaactgacagctcctgaatccaacctggaagtgagttatcaaaactatcatcgcggcgtattcagcagccagttgcaactgttggtgaaacccattgccgggaaagaaaatccgtggattaaaagcggtcagagcgtcatcttcaacgaatcggttgatcatggtcccttcccgcttgcccagcttaaaaaactgaacctgatcccgtcgatggcatcaattcaaaccacgctggttaataacgaagtaagcaaaccactgtttgatatggcaaaaggtgaaacgccttttgagattaactcgcgcattggttacagcggtgattccagttccgatatttcgctcaagccactgaattacgagcaaaaggatgaaaaagtcgcctttagcggcggcgagttccagttaaatgcggacagagacggcaaagctatctccctttccggggaggcgcaaagtggtcggatagacgcagttaacgaatacaaccagaaagtgcagttgacctttaataatctgaaaaccgacggttccagcacgctggcaagttttggtgagcgcgtaggaaaccaaaaactgtcactggaaaaaatgaccatttcggtggaaggcaaagaactggcactgctggaaggcatggagatcagcggtaaatcggatctggtcaatgatggtaaaacgatcaatagccaactggattactcgctaaacagcctgaaggtacagaatcaggatctgggcagcggcaagctgactttaaaagtcggccagattgatggtgaagcctggcatcagtttagccagcaatataacgcgcaaactcaggcgctgctggcacagccagaaattgccaacaatcccgaactttatcaggagaaagtgacggaagccttctttagcgccctgccgctgatgttgaaaggcgatccggtgattactatcgcgccgctaagctggaaaaacagtcagggtgaaagtgcgctgaatctgtcgctgttcctgaaagatccggcaacgactaaagaagcgccgcaaacgctggcgcaggaagtagatcgttcggttaaatctctggatgcgaaactgaccattccggtggatatggcaactgagtttatgactcaggtagcgaagctggaaggttatcaggaagatcaagcgaaaaaactggcgaaacagcaagttgaaggtgcatcagcaatggggcagatgttccgtctgaccaccttgcaggacaataccatcaccaccagcctgcaatatactaacggtcagataacgttaaacgggcagaaaatgccactggaagatttcgttggtatgtttgcaatgccggcattaaatgttccggtcgtacccgctattccgcagcagtaattcacagccaaaacgccggagatttttctctccggcgttatttcttacttcagcataaagtcatactgaatactcattttcacatcccagtaattcaggcgatcgcccagcgtactgccatcgcgcttttcccgccctttatcggcagcaagaaagaaattcatcccttgtaacggcccttcgctgacccgatagttcataccacctaagatacccatgccttcaatccgcacatctcgtttactggattcatagccgcgagtcacaatcggtgcaaatgtcagtgtaaattgcggcgttaaacgatagttgacgcccaattgccaggactgcattccttcacggttacgatcaagacttaatgaaaagggatagccaatgtcggtatccaccacggcaccattcattgcatggcgcaaataaccaccactgccaaatacgcttccccacggcgcattccaggtcaattgtccactaaccaacgccgtttcattgggctggctggtattacgacttaaaccttcgagctgcgcgtaaaagccgagcaactcccctttcaacgtataattcgggtcgagcggtatgcttttctcgagaatactttgtatctgattggaaacatctttctgtaccgatgcccccagagaatagcgactggtatcatcatgccaactggcggctaaaaaagaacgtgcgcgatgtttatcgtattttcccgtctggctgttatacaccccttcatcacgaataccggttgttgaatcagtccataaaaatactcgtgaacgccacattccccacagatcaatatttggtgttaaagcccaataacctaatgctccttcagaaactgtcggtaatgtacgttgcgaactgccagccattaacggaatacgataaggtaagctaccataactataatccgtcccgaagcgacctaatttaagcaggctattttcactgggttttatttttactgcccccagggcaaagccaaaacttttatcaccatcaagataccaccgggtactcatatcagcacgagcacctaatttataaacataatacgccccgccttcaacgccaataatattggaataataaccactattgaaatcgagcaatcctccctgtacccatgcgtaaatatctcttcccgcgccagcactgggcttatccgccctgcgcaattcgtttttcagtctgatgcgtagtcccgcttcatcgtcagccagttgcgccgcataagcagaggtaaggccagaggcagccgtcaggcaaataacggccatggccactatttttctcatagttgcacctttgatgttctgattatttttattgaatattaattagtgatatcgctgattaattgctgctgcacttttttacgattatcaatttcaaccacgatttctttgaattttttatccgtgagcggataaaaccagataataacgaatgccagtagcataaatccgcaaggtactaaggcaattgatgtgcggatgcccataataacttccggcgtttgcacctgattggcgatatatccgcttaatcccaaaataaaggcaggaattgaacctccgattgcctgaccgcatttacgggtaaatgagaatagtgaataggtgagcccttcaattcgcacgccggtcaggtattcaccgtattctacggtatcagcttccagtgcccacatcacagtcatagtaacgccctgaccaattgaagcgatggccaacgcaaccaacgccaccggcagtgaccagacggaaacccagaagaatagcagataaccgcaggttcccagcaaagcgccaatcaggaaggtattctttttaccgatcctcgcgaccatccccggcaccagcggtgccgatgccacagtaccaaccaggttttgcaccagtaccagcacagtgaacagcccggtatcatttaacacatagcgcacgtagaacaacgacgaggcgctgaccgcgaaggtcgaaatcagcacacacagcgcaccgatgcacaacataaacagcgggcgattccgtttcagggtttgcagactgatcttcaatgacggctgcgccacgatacgtaccacattctcacgcgtcgatttgaagcagatgaagtaaagcaccattccggcaatcgccagcacaatcgtccagaaatggtataccgacaccatctcttccgggctggagttcttaatgctcggtcctatcagaaatgccaggcagacaaaggttaatgaagcggcaatcccgcgagccgcgcccagacgggcgcgggattgtggttgttgggtcatcgcggtagcaagtgaaccataaggaatattcaccaggctgtagcaaagcccgaggcccatgtaggtcaaatatgcatacactactttgctgctatggctccagtcggtcggtacccagaataccagcacgctgaagatcattaacggcgcagtaccgaagagtaaaaacgggcggaattttccccagcgggtattcacactgtccaccactcgtccggcaaagacgtcggcgaaggcatcgaatacccgcaccagtaacagcatggtgcccgccgcagcggcaccgacgccagcgacgtcggtgtagtaactcaataggaagagcgcccccattgcgaaggcgaagttattggcgacgtcaccgaggctgtagccgacgatggtgcgccaggagagttgttgattcattgtttgcctccctgctgcggtttttcaccgaagttcatgccagtccagcgtttttgcagcagaaaagccgccgacttcggtttgcggtcgcgagtgaagatccctttcttgttaccgccaacgcgcaatatgccttgcgaggtcgcaaaatcggcgaaattccatacctgttcaccgacgacggcgctgacgcgatcaaagacgcggtgatacatatccagccatgcacactgatactcttcactccacatgtcggtgtacattgagtgcagcccggctaacgtatccacgccgtattcggtgatgataatcggctgatgcagtttctcctgccaggccagaagttctttttccagtaccttctctgccgtttccaaatcgccgctttggacataccatccgtaataacggttcaggcacagcacatcaaagagatcgctgatggtatcggtgtgagcgtcgcagaacattacattgacgcaggtgatcggacgcgtcgggtcgagtttacgcgttgcttccgccagtggcgcgaaatattcccgtgcaccttgcggacgggtatccggttcgttggcaatactccacatcaccacgcttgggtggtttttgtcacgcgctatcagctctttaatcgcctgtaagtgcgcttgctgagtttccccgttgactgcctcttcgctgtacagttctttcggcttgttgcccgcttcgaaaccaatgcctaaagagaggttaaagccgacagcagcagtttcatcaatcaccacgatgccatgttcatctgcccagtcgagcatctcttcagcgtaagggtaatgcgaggtacggtaggagttggccccaatccagtccattaatgcgtggtcgtgcaccatcagcacgttatcgaatcctttgccacgcaagtcagcatcttcatgacgaccaaagccagtaaagtagaacggtttgtggttaatcaggaactgttcgcccttcactgccactgaccggatgccgacgcgaagcgggtagatatcacactctgtctggcttttggctgtgacgcacagttcatagagataaccttcacccggttgccagaggtgtggattcaccacttgcaaagtcccgctggtaccttgtccagttgcaaccacctgctgatccgcatcacgcagttcaacgctgacatcaccatttgctaccacctgccagtcaacagacgcgtggttacagtcttgcgcaacatgcgtcaccacggtgatatcgtccacccaggtgttcggcgtggtgtagaccattacgctgcgatggatcccggcatagttaaagaaatcatggaagtaagactgctttttcttgccgttttcatcggtaatcaccattcccggcgggatagtctgccagttcagttcgttgttcacacaaacggtgatacgtacacttttcccggcaataacatacggcgtgacatcggcttcaaatggcgtatagccgccctgatgctccatcacttcctgattattgacccacactttgccgtaatgagtgaccgcatcgaaacgcagcacgatacgctggcctgcccaacctttcggtataaagacttcgcgctgataccagacgttgcccacataattacgaatatctgcatcggcgaactgatcgttaaaactgcctggcacagcaattgcccggctttcttgtaacgcgctttcccaccaacgctgatcaattccacagttttcgcgatccagactgaatgcccacaggccgtcgagttttttgatttcacgggttggggtttctacaggacgtaacataagggactcctcattaagataaaaatactggtcaacctttaatctgattagttaaccaattctgtgttgcacacagttatctgtgagaaacccatggaagagaaatggaaataaaaagaactgacaccgcgatcaaaaaaccaaaaactgcaatacccacagcgtgatattgatcgcattaatctttaaaacggcgttgacagaagccataaattaagcaaccgaacgttcgttcgagtatattgggaacgataaactctcatgacatatggctacggtgaatatttttgggggggaattctccgatcccggctagattgtattttgtacagggaaattaaagtatgaaacgcgggcacagttatcaccagcccgcgaaatgagaggatcaggatgcggttaagataccgccaatcatcgcgcgtaatccctgagcaaacgacgcttcacgcgccagatcttccgcttcgatatcggccagtacaccgtaggtcagatccagcagtaaacgtgaagtcattgacgtgttgatgtctgggcttatctcgcctttttgctgggcatcacgcatccgctgggcaacaaattcagtgatcgtcatatgcttatttttaagcatggcggcgacctgtgggttacgcatcccttccgccataatttcgaccaccagcgcccgttgcccaaaggcttcatgggtgagagagacaatagactcgaccatatagtcaacaaaatgaatcccttcaatcggttcccggaaacgggccagcgccctctcctggtcctgtaagataatcgcctgaatcaaggcttctttggagatgaaatggtgatagagcgtcccgggactgatggcgcaggatttacagatggctttcatcgaggcactgtgaaatccattttctgaaaaaatctctctggcagcattgaggatccgggtccgtgtcggttgtgcttcagtctgcatgttatccatcattaaaccattatagttagcgtgaataactagtttaccgcgttgtcaggtgagcgcctatcattgctgttgaatagtgcgaaggcacactctattcgtatgcttttcatccagctattggttaaccaatagccgtgatttggctgccagttgtttagcagagacgttgatgaattgcacacgctatcccggtaaacaacacatacggctgtttaccggttcgttagtgtattaattgagctcctgtaccccaccaccggagacggtgagaatttgtccgcttacccagctggctgcaggcgagcaaaggaacagcgccgcgttagcaatatcttgcggttggcccagacgtctgatcggcgtgtgctgtaacattttttgttcaatttctggtgtaataacggatttcagggcatcggttaatattgcccccggcgcaatgccattcacccgaatatttttttcacccaggtcaaatgccatatttctgaccagatgactggccgcagctttagatgatgcataggaagtcatgtttatatttttattttctgccgccatagaagtgatggtcagaataacgccaccgccatttttttccatttctggcgcaacaagttgtgacagatggaaaaaagaaaacacattcagttcataagcacggcgaaaatctgccattggcatatcaaacggtttaggaccaccgccaccggcgttgttaaccaggatatcaactttacccagcttactgacggcaaagtctgccagtgcagagagttcctgttcggaagtaatatcacaacggcaggcaaatgcctgaccacccagttgttgaatttcgtctacaacatggttagctgcgtcggcgttaatatcactgaccaccacagatgcgccagctgtcgcgaatgtaatggcgatttctttaccaatacctgcacccgcacctgtgatgatggcgcattttccgtcgagtctcaggttgtcagaattaaacacataaacctcctgtgaacttcagtaaaaataaaaggcaccgcctgtgtgccacattttttatcattaaccttgaggaaaggacactaccaggtatagcagataaagagaggattatttcgccgcaatgagccgggcgggaataataagattgcgtgaatgcgtctcttcatgggtgattttttgcatcatgcgatccgcaagtgtggtaccaagttcccgcgcaggcgtgctggcccaggtaacgggtatatcatcaagtgtggttggtgtcgcatcggtaaatgccgccagcgaaacttgttgctcaaagtaacgatcgactccgctttccccgctttgccgccctgctttgagcaaaccaaaccatgcccccatcgcaatagtttcgttatagcaaaccacagcactgatggtcgggttatgacgtaaaagcgccgtgatagcttccgcggcttgcttctggctggatgtgcactccagcacccaatcgctgtgaaacggcaggccaaattttagtagagttgcacaatagccccccacccgttctgcacgggttaatgaggaactttgccctcccagccaggcgatccgctgatgcccattgcgaatgagatgctccgtcaacaactgtgcagcctgcatgttgtccgggcgaaccgtatcaacatcatcaagataactggcacgggaagcgaaaatcaccgggatagctttttcttctgccatccgtcgcaggtcatcgctgcttcctgcagccccggcaattaccacaccatccacaccctgattcagtaacagtgaaaaccgctgtgccagctgctcgccgtctttaccaccgtgaagcaaaaaaaccatccgtccctgcgcttccagagcttccgtcaatccggccgtcaattcggcgtaaaacggcgcagataaatcacggacgatcaaaccaatgacgccgctttgcccgccgcgcagcgccgacgcctggcgattgcgcacaaatcccagctcttcaatggcggcgttaacgcgttctcctgtggcggtagagattcgccctttgccactaagcaccagcgaaacggtacttaccgacacgcccgcagccagcgcaacatcatgaatggttatttttttggcggtagccatgcagatgacctactccctgattatgtgacagataaaacgttttaccttttatttatcttatacccgctattatcgttgcgtaatgtgatttatgcctcactaaaatttgataaaacgttttatcttctcgcgcaatttactgaatccagattgttctctacgaggagtcgttttatgacggcgaaaacagcaccgaaagtcacgctgtgggagttcttccagcagttaggcaaaaccttcatgttacccgtggcattattgtcgttctgcggcattatgctcggcattggtagttctcttagcagccatgatgtcataaccctgatcccggtcctgggcaaccccgtgttgcaggctatctttacctggatgagtaagattggctcgtttgcttttagtttcctgcctgtcatgttctgtatcgccatcccgctgggcctggcacgcgaaaataaaggcgtagcggcattcgctggcttcgtcggttatgcggtaatgaacctcgcggtaaacttctggttgaccaataaaggcattctgccaaccacggatgccgcggttctgaaagccaataacatccagagcattcttgggatccagtcgatcgataccgggatcctcggtgcggtgatcgccggtattatcgtctggatgctgcatgagcgtttccataatatccgcctgccggatgcgctggcattcttcggcggtacgcgcttcgtaccaattatctcctcgctggtgatgggccttgtcggcctggtgattccattagtctggccgattttcgccatgggtattagcggcttgggccatatgataaacagcgcgggtgatttcggaccgatgctgtttggtaccggtgaacgtctgctgttgccgtttggtctgcatcacattctggtagcattaattcgctttaccgacgcaggcggcacgcaggaagtctgcggtcaaaccgtcagcggcgcactgaccatcttccaggcgcaattgagttgcccgaccactcacggtttttctgaaagcgccacgcgtttcctttcgcaaggtaaaatgcctgcgtttctcggcggtctgccgggtgcagcgttagctatgtatcactgcgcgcgcccggaaaatcgccataaaattaaaggtctgctgatttctggcctgatcgcctgcgtcgttggcggcactaccgaaccgctggaattcctgttcctgttcgtagcgccagttctgtatgtcatccacgcgctgttaaccggcctcggcttcaccgtcatgtctgtgctcggcgtcaccatcggtaataccgacggcaatatcatcgacttcgtggtgttcggtattttgcatggtctgtcaaccaagtggtacatggtgccagtggtggcggcaatctggtttgtcgtttactacgtcatcttccgtttcgctatcacccgcttcaatctgaaaaccccggggcgcgatagcgaagttgccagctcaatcgaaaaagccgttgccggtgcgccgggtaaatcaggttacaacgttcctgcaatcctcgaagcattaggcggtgccgacaatattgtcagcctcgataactgcattacccgtctgcgtttgtctgtgaaagatatgtcgcttgttaatgtgcaggcactgaaggacaatcgggcaattggcgtagtacaacttaatcaacataacctgcaggttgttatcgggccacaagttcagtcagtaaaagatgaaatggccggtctgatgcatactgtccaggcataaggataagatatgttcgattttcaaaggtcgtggatcgtcatggcacatggtgtacacagtgggattatgtcgctgaccgtttcggcactgctgacctgttaccgttcacgatttcagacatggattttgccactgccccctgcattatcgaggcgctgaatcagcgcctgatgcacggcgtatttggctacagccgctggaaaaacgatgagtttctcgtggctattgcccactggttttccacccagcattacaccgcaattgatacgcagacggtggtgtatggcccttctgtcatctatatggtttcagaactgattcgtcagtggtctgaaacaggtgaaggcgtggtgatccacacgcccgcctatgacgcattttacaaggccattgaaggtaaccagcgcacagtaatgcccgttgctttagagaagcaggctgacgactggttttgcgatatgggcaagctggaagccgtgttggcgaaaccagaatgtaaaattatgctcctgtgtagcccacagaatcctaccgggaaagtgtggacgtgcgatgagctggagatcatggctgacctgtgcgagcgtcatggtgtgcgggttatttccgatgaaatccatatggatatggtctggggcgagcagccgcatattccctggagtaatgtggcgcggggagactgggcgttgctgacgtcggctcgaaaagtttcaatattcccgcgctgaccggtgcttacgggattatagaaaatagcagcagccgtgatgcctatttatcggcactgaaaggacgtgatgggctttcttccccttcggtactggcgttaactgcccatatcgccgcctatcagcaaggtgcaccgtggctggatgccttacgcgtctatctgaaagataacctgacgtatatctcagataaaatgaacgccgcgtttcctgaactcaactggcagatcccgcaatccacttatctggcctggcttgatctacgtctgttgaatattgacgacaacgcgttgcaaaaagcgcttatcgagcaagaaaaagtcgcgatcatgccggggtatacctatggtgaagaaggtcgtggttttgtccgtctcaatgccggctgcccacgttcgaaactggaaaaaggtgtggctggattaataaacgccatccgcgctgttcgctaaccccaattgcgcaacgtaaaaaatcgttgcgcaatcgtggatttttaccctgctttgtttttataatggtgcgcacttttatattcagaaaaagagtgcgaccatgattgataccaccctgccattaactgatatccatcgccaccttgatggcaacattcgtccccagaccattcttgaacttggccgccagtataatatctcgcttcctgcacaatccctggaaacactgattccccacgttcaggtcattgccaacgaacccgatctggtgagctttctgaccaaacttgactggggcgttaaagttctcgcctctcttgatgcctgtcgccgcgtggcatttgaaaacattgaagatgcagcccgtcacggcctgcactatgtcgagctgcgtttttcaccaggctacatggcaatggcacatcagctgcctgtagcgggtgttgtcgaagcggtgatcgatggcgtacgtgaaggttgccgcacctttggtgtgcaggcgaagcttatcggcattatgagccggaccttcggcgaagccgcctgtcagcaagagctggaggcctttttagcccaccgtgaccagattaccgcacttgatttagccggtgatgaacttggtttcccgggaagtctgttcctttctcacttcaaccgcgcgcgtgatgcgggctggcatattaccgtccatgcaggcgaagctgccgggccggaaagcatctggcaggcgattcgtgaactgggtgcggagcgtattggacatggcgtaaaagccattgaagatcgggcgctgatggattttctcgccgagcaacaaattggtattgaatcctgtctgacctccaatattcagaccagcaccgtagcagagctggctgcacatccgctgaaaacgttccttgagcatggcattcgtgccagcattaacactgacgatcccggcgtacagggagtggatatcattcacgaatataccgttgccgcgccagctgctgggttatcccgcgagcaaatccgccaggcacagattaatggtctggaaatggctttcctcagcgctgaggaaaaacgcgcactgcgagaaaaagtcgccgcgaagtaacaaaatggatggtgcaaattgcaccatccatttttcatgcaaggcacaaagtcgcgcgatgtttggcggattcgatgcccagctcaatcaactccattacctggattgcctggcttgccggaaccggattttcaccatcgccatttaacgcatcacgaatagccgcatagtaagccggataattcccaggcaccgtcaacagcgtttcttcgacacgttcctcaccttccacgcgggtaagtacgccatcacgcatatcgtagccccagtcttcctgcggtagacgctcgccatttttcagacgttcttcctgtggatcgaggccatatttcacataactgcctcgggatccatgcacgatataccgtgctgactcagcggctgccagcatggtaccgtgtaaaatgactcgccgctgtggataggacaagatggcgtggaaataatcggtcgactgcgctccgggccgtaactgtgccaaatctaccgtcatgctgaccggtaaaccaaaaagcgtaatggcctgatcaagaagatgtggtgctaaatcgtaccagataccgctgcctgggccgccctgttcacgccaacgatcgcgcacctgcggacggaagcggtcaaaatgagactcaaagtaagcaacttcacccagcacgccttccgcgagtaaaccttttagcgtcaagaaatcgctatcccagcgacggttatggaatacagacagcacacgccccaggctttttgccagcgcatccagctctcgcgcttgtgacagtgtcacggtaaagggtttatcaacgaccacatgtttacccgcctcaagcgccgctttggctaacgggaaatgggtatcgttgggtgtaggaatgacaatcaggtctatgttgggatcgttaaacagatgcttcggctcagagacaaccgtaaccgttggccagtcggcttttacttttgtttcatcactgctggagattaccgccagttccagcccgggcgtgcccgcaatcaggggcgcatggaaggttttgctcgcataaccatacccaatcaacccaacacggatgttgtcgctcatgtcattgcctctcattgaagtatgatggctatttgacactatcctttacccacgctcaacagtttaataacctgccagcaataagggatgttgtttaacttaagtcaaaaaatagcgaattttccaacgacaaaagctaaatatcgcaaaaacctcagtaaaaatcttgctggagctattattgctaagtaacatttaccccctgaagttaatggatcaatcaagagagatgtgggctgtaatgaatcgtcttattgaattaacaggttggatcgttcttgtcgtttcagtcattcttcttggcgtggcgagtcacattgacaactatcagccacctgaacagagtgcttcggtacaacacaagtaagctctgcacttgtggagcgacatgctgcccgtccgggtgcatgttttcacttgtcggatattaaaccaggaatttattatcttgttcgatgttgttggtgattgtcagggatagtaaagcgcgttactcttttcagagcagtttttcatccctgaatatttgccatcagcgcattcttattattgtaataacacaagcgttcacttttggtgaaattttatcatcactaataatacctacccctttggtattaattattttatggaccttttatgactgttcaggactacttattaaaatttcgcaaaatcagttcactcgaaagtctggaaaaactctacgaccatcttaattacaccctgacggacgatcaggaactgatcaatatgtatcgtgctgccgatcaccgtcgcgcagagctggtttctggcgggcgtttgtttgacctcggccaggtaccgaagtccgtctggcactatgtccaataaagaaagtagcgatcggttataaaagccttataataacgcccctaaaattagatttgcctgtttgcgtcgctattctggagaacctatgaccaccacaacgccacaacgtattggaggctggttgcttggcccgttggcctggcttttagtcgctctgttgagtacgacgctggcgttgttgctgtataccgctgcgttatcttctccgcaaacatttcaaacgctcggcggacaagcactgacgacacaaatcttatggggcgtttcttttattaccgctatcgccatgtggtattacacactgtggttgaccatcgctttctttaaacgtcggcgttgtgttcctaaacactatattatctggctgcttatttccgtattgctggcagtaaaagcattcgctttttcacccgtggaagatggcatagccgttcgccagttgctgtttactttgttggcaaccgcattgatcgtcccctatttcaaacgctcgtcgcgggtaaaagcgacgtttgtgaatccgtaataaccttacagttaacctgttgtcgcctgctctggattaacggataataggcggcttttttatttcaggccgaaaaatgactgactacctgttactgtttgtcggaactgtactggtcaataactttgtactggtcaagtttctcggtctctgtccgtttatgggggtttccaaaaaactggaaaccgcgatgggcatggggctggcaacaacgtttgtgatgacgctggcgtctatttgcgcctggcttatcgatacgtggattttgatcccacttaatctgatttacctgcgcaccctggcatttattctggtgattgctgtggtcgtgcagttcaccgagatggtggtgcgcaaaaccagcccggtgctttaccgtctgctggggatttttttgccgcttatcaccaccaactgtgcagtgctcggcgtggcgttgctgaatatcaatctcgggcacaatttcttgcagtcggcgctgtacggtttttccgccgctgtcggtttctcgctggtgatggtgctcttcgccgccatccgcgaacgccttgctgtggctgatgtcccggcaccttttcgcggtaatgccattgcgttaattaccgcaggtcttatgtctctggcctttatgggctttagtggtttggtgaagttgtaatgaatgctatctggattgccgttgccgccgtgagcctgctgggcctggcgtttggcgccattctgggttatgcctcccgccgttttgcggtggaagacgatccggtcgttgagaaaattgacgaaatcttaccgcagagccagtgtggtcagtgcggttatcccggctgtcgcccctacgcggaagccatcagctgtaacggtgaaaaaatcaaccgttgcgccccaggtggcgaagctgtgatgctaaaaattgccgagttgcttaatgtcgagccgcagccgctggatggcgaagcgcaagagctaacgcctgcgcggatggtggcggttattgatgaaaataactgtattggctgcactaaatgtattcaggcttgtccggtagacgccatcgttggcgctacccgtgccatgcatacggtaatgagtgatctctgtacgggctgcaatttatgtgttgatccgtgcccgacgcactgcatctcgttgcaaccggtcgcagaaacacctgactcctggaaatgggatctgaacaccattcccgtgcgtatcattcccgtggaacaccatgcttaagttattctctgcattcagaaaaaataaaatctgggatttcaacggcggcatccatccaccggagatgaaaacccagtccaacggtacacccctgcgccaggtaccactggcgcagcgttttgttattccactgaaacagcatattggcgctgaaggtgagttgtgcgttagcgtcggcgataaagtattgcgcggccagccgcttacccgtggtcgcggcaaaatgctgcctgttcacgcgcccacctcgggtaccgttacggctattgcgccccactctacggctcatccttcagctttagctgaattaagcgtgattattgatgccgatggtgaagactgctggatcccgcgcgacggctgggccgattatcgcactcgcagtcgcgaagagttaatcgagcgcatacatcagtttggtgtagccgggctgggcggtgcaggattcccgacaggcgttaaattgcagggtggcggagataagattgaaacgttgattatcaacgcggctgagtgcgagccgtacattaccgccgatgaccgtttgatgcaggattgcgcggctcaggtcgtagagggtattcgcattcttgcgcatattctgcagccacgcgaaattcttatcggcattgaagataacaaaccgcaggcgatttccatgctgcgcgcggtgctggcggactctaacgatatttctctgcgggtgattccaaccaaatatccttctggcggtgctaaacaattaacctacattctgaccgggaagcaggttccacatggcgggcgttcatccgatatcggcgtattaatgcaaaacgtcggcactgcttatgcagtgaaacgtgccgttattgatggcgagccgattaccgagcgtgttgtaaccctgactggcgaagcaatcgctcgcccgggcaacgtctgggcacggctggggacgccagtgcgtcatttattgaatgatgccggattctgcccctctgccgatcaaatggtgattatgggtggcccgctaatgggctttaccttgccatggctggatgtcccggtcgtaaagattaccaactgtctgttggctccctctgccaatgaacttggcgaaccacaggaagaacaaagctgcatccggtgtagcgcctgtgctgacgcctgccctgcggatcttttgccgcaacagttgtactggttcagcaaaggtcagcaacacgataaagctaccacgcataacattgctgattgcattgaatgtggggcttgcgcgtgggtttgcccgagcaatattcccctggtgcaatatttccgtcaggaaaaagctgaaattgcggctattcgtcaggaagaaaagcgcgccgcagaagccaaagcgcgtttcgaagcgcgccaggctcgtctggagcgcgaaaaagcggctcgccttgaacgacataagagcgcagccgttcaacctgcagccaaagataaagatgcgattgctgccgctctggcgcgggtgaaagagaaacaggcccaggctacacagcctattgtgattaaagcgggcgaacgcccggataacagtgcaattattgcagcacgggaagcccgtaaagcgcaagccagagcgaaacaggcagaactgcagcaaactaacgacgcagcaaccgttgctgatccacgtaaaactgccgttgaagcagctatcgcccgcgccaaagcgcgcaagctggaacagcaacaggctaatgcggaaccagaagaacaggtcgatccgcgcaaagccgccgtcgaagccgctattgcccgtgccaaagcgcgcaagctggaacagcaacagtctaatgcggaaccagaagaacaggttgatccgcgcaaagccgccgtcgaagccgctattgcccgagccaaagcgcgcaaactggaacagcaacaggctaatgcggaaccagaagaacaggttgatccgcgcaaagccgccgtcgaagccgctattgcccgtgccaaagcgcgcaagctggaacagcaacagactaacgcagaaccagaagaacaggttgatccgcgcaaagcggcagttgccgcggctattgcccgcgctcaggccaaaaaagccgcccagcagaaggttgtaaacgaggactaaatggtattcagaatagctagctccccttatacccataaccagcgccagacatcgcgcattatgctgttggtgttgctcgcagccgtgccaggaatcgcagcgcaactgtggttttttggttggggtactctcgttcagatcctgttggcatcggttagtgctctgttagccgaagctctcgtactcaaactacgcaagcagtcggtagccgcaacgttgaaagataactcagcattgctgacaggcttattgctggcggtaagtattcccccctcgcgccatggtggatggtcgtgctgggtacggtgtttgcggtgatcatcgctaaacagttgtatggcggtctggggcaaaacccgtttaatccggcaatgattggttatgtggtcttactgatctccttcccggtgcagatgaccagctggttaccgccacatgaaattgcggtcaacatccctggttttatcgacgccatacaggttattttcagcggacataccgccagtggtggtgatatgaacacactacgcttaggtattgatggcattagtcaggcgacaccgctggatacatttaaaacctctgtccgtgccggtcattcggttgaacagattatgcaatatccgatctacagcggtattctggcgggcgctggttggcaatgggtaaatctcgcctggctggctggcggcctgtggttgctatggcagaaagcgattcgctggcatattcccctcagcttcttagtaacgctggcgttatgcgcaacgttgggctggttgttctcaccagaaacactggcagcaccgcaaattcatctgctgtctggtgcgaccatgctcggcgcattctttattttgactgacccggttaccgcttctacgaccaatcgtggtcgtcttattttcggcgcgctggcgggcttattagtctggttgatccgcagtttcggcggctatcctgacggcgtggcttttgccgtcctgctggcgaacatcacggttcctctgatcgattactacacgcgtccgcgcgtctacggccatcgcaaagggtaaaccatgctgaaaactatccgaaaacacggcattacgttagcgctatttgcagcgggttcaacagggttaactgcggccatcaaccagatgaccaaaacgacgattgctgaacaggccagtctgcaacaagaggcattatttgatcaggtgctgccagccgaacgctataacaatgcgctggcacagagttgctatctggtaactgcgccagagttaggtaaaggtgagcatcgggtttacatcgccaaacaggatgacaaaccggtagccgccgttctggaagcaaccgcgccagatggctattccggtgcgattcagctgctggtgggagccgattttaacggcacggtacttggcacgcgcgtgacagagcaccacgaaacgccagggcttggcgataaaatcgaactgcgcctttctgactggatcacccattttgcgggtaaaaaaatcagtggtgcagatgatgcgcactgggcggtgaagaaagatggtggtgatttcgaccagttcaccggcgcgacgattactccccgcgcggtggttaatgcggtaaaacgcgccggattgtacgctcagacgttaccggcacaactttctcaacttcctgcctgtggagaataaagcgtgagcgaaattaaagacgttattgttcaggggttgtggaaaaacaactctgcgctggtccagttgctcggcctttgtcctctgttggcggtcacgtccactgccactaacgctctgggtttaggacttgcgactacgctggtactgacgctgaccaacctgaccatttcgacgctgcgtcactggacgccagccgagatccgcattcccatttacgtgatgatcatcgcctcggtggtcagcgctgtacagatgctgatcaacgcctacgcctttggcctgtatcaatcattagggatttttattccgctgattgtcactaactgtatcgttgtgggccgcgctgaagccttcgccgccaaaaaaggtccggcgctttcggcactggacggcttttcaattggtatgggcgcaacctgcgccatgttcgtgctgggttcactacgcgaaattatcggcaatggcacattgtttgacggtgcagatgcgctgttaggtagctgggcaaaagtattacgcgtggaaattttccacaccgactcccctttcctgctggcgatgctgcctccaggtgcatttattggcctgggactgatgctggcaggaaaatacctgattgatgaaagaatgaaaaagcgccgtactgaagcagctgccgaacgtgcattgccaaacggtgaaacagggaatgtctgatgaacaaagcaaaacgcctggagatcctcactcgcctgcgtgagaacaatcctcatcccaccaccgagcttaatttcagttcgccttttgaattgctgattgccgtactgctttccgctcaggcgaccgatgtcagtgttaataaggcgacggcgaaactctacccggtggcgaatacgcctgcagcgatgcttgaactgggcgttgaaggggtgaaaacctatatcaaaacgattgggctttataacagcaaagcagaaaatatcatcaaaacctgccgtatcttgctggagcagcataatggcgaggttccggaagatcgtgctgcgcttgaagccctgcccggcgtaggtcgtaaaacagccaacgtcgtattaaacactgcattcggctggccgactattgctgtcgacacgcacattttccgcgtttgtaatcgtactcaatttgcgccggggaaaaacgtcgaacaggtagaagaaaagctactgaaagtggttccggcagagtttaaagtcgactgccaccattggttgatcctgcacgggcgttatacctgcattgcccgcaagccccgctgtggctcttgtattattgaagatctttgtgaatacaaagagaaagttgacatctgaagaaaaggggtaacaccgattaccccattgataacctttctttatcctcttttaaaacttctttttaacgtgaatgatgccattgcttagcgttatcatcaggtaatccgtttgcggataaccaaaaatgcaggttaattgtttttttaatagcgaaattttctattcattcgtgatcaagatcacgatgctgtcgcaatgtaaaaacattgcaagaatcaggttaaaatcatttaaatttacacacgcaacaaatattgacctacaaaacattacactggctatttttcagaaactggactatctcactagtaaaaacgctaaatagcagaacatatcgccgttaagccatcacccccctctcagtgcagtgaaaaaatctgccgttacgttttttgaaaaatttaacgctggataacatttcccggaatggttgaattccccgcctcagttatatgtaacagattattacaaaggacttgtctgaaagtgcaagatagtgaacattacctgccgtttcccctcccactataacaattgcgcgtatgttttttagacataacgcgagaaagcacccccgttaatatgggatgtaaaaaaagaggtaaaagtgtccactgcaaaccaaaaaccaactgaaagcgtcagtttgaacgctttcaaacaaccgaaggcgttctatctcatcttctcgattgagttatgggaacgttttggttattacggcctacaaggaattatggctgtttacctggttaaacaactgggtatgtctgaagcgaattcaatcacccttttctcttcctttagtgccctggtttatggtctggtcgctatcggcggctggttaggtgacaaggtactgggtactaaacgcgtaattatgctcggcgctattgtgctggcgattggttatgctctggttgcctggtctggtcacgacgccggtatcgtttatatgggtatggcggctattgcggtcggtaacggcctgtttaaagctaacccgtcttctctgctttctacatgctatgagaaaaacgacccgcgtctggacggtgcattcaccatgtactacatgtccgtcaacatcggctctttcttctctatgattgcaacgccgtggctggccgcgaaatacggctggagtgttgcgtttgcgttgagcgttgtaggcctgctgatcactatcgttaacttcgccttctgccaacgctgggttaaacagtacggttcaaaaccagacttcgagcctatcaactaccgtaacctgctgctgaccattattggtgttgtggcactgatcgctatcgccacctggctgctgcacaatcaggaagttgcgcgtatggcgctgggcgttgttgccttcggtatcgtggttatcttcggtaaagaagccttcgcgatgaaaggtgctgcgcgtcgtaaaatgatcgttgccttcatcctgatgctcgaagccattatcttcttcgtgctgtacagccagatgccaacgtcactgaacttctttgcgattcgtaacgttgagcactccattctgggtctggccgtagaacctgagcagtatcaggcactgaacccgttctggatcatcatcggtagtccgattctggccgctatctataacaagatgggcgataccctgccgatgccaaccaagtttgcaatcggcatggtgatgtgttctggtgcgttcctgattctgccgctgggtgcgaaattcgcgtctgacgctggtatcgtgtctgtaagctggctggtcgcaagctatggcctgcagagcatcggggaactgatgatctctggtctgggtctggcaatggttgcacaactcgttccgcagcgtctgatgggcttcattatgggtagctggttcctgaccactgccggtgcaaacctgattggtggttatgttgcgggtatgatggctgtgccggataacgttaccgacccgctgatgtcactggaagtttatggtcgcgtattcttgcagattggtgtcgctactgccattattgcagtactgatgctgctgaccgcgcctaaactgcaccgtatgacgcaggatgacgctgcagacaaagcggcgaaagctgctgtagcgtaaaattcagggaaactcttttacaagccgctaacttttcgttagcggcttttttttgttcagcaacgcactaccatactttaaaccacagacaaaaggagttaccgatgaaattgttctacaaaccgggtgcctgctctctcgcttcccatatcaccctgcgtgagagcggaaaggattttaccctcgtcagtgtggatttaatgaaaaaacgtctcgaaaacggtgacgattactttgccgttaaccctaaggggcaggtgcctgcattgctgctggatgacggtactttgctgacggaaggcgtagcgattatgcagtatcttgccgacagcgtccccgaccgccagttgctggcaccggtaaacagtatttcccgctataaaaccatcgaatggctgaattacatcgccaccgagctgcataaaggtttcacacctctgtttcgccctgatacaccggaagagtacaaaccgacagttcgcgcgcagctggagaagaagctgcaatatgtgaacgaggcactgaaggatgagcactggatctgcgggcaaagatttacaattgctgatgcctatctgtttacggttctgcgctgggcatacgcggtgaaactgaatctggaagggttagagcacattgcagcatttatgcaacgtatggctgaacgtccggaagtacaagacgcgctgtcagcggaaggcttaaagtaatatccatcggcccacaggtcgttgtgggccgaaatgagatatttcagagctttgttgcgctgaagtaatgttctggtttggcaatacgatcctgagcagccaccacttgcagctcatattcctgcattgctttggtggtcaccatgatttcgtagactgcagcggtcacatgttccagcgcctcctgcagcgttgccccctgaagcagtttcaccagcagtaaaccgctcgtcacatcaccaacacctaccggctggcgcataccaaaatccaccagcggacggctgatatgccaggcttcatcggcggtgaccagcagcatttcaaaacggtcacggctgtagccagctcgcgccaggtgtttaaccaacacaatttgtggcccttgcgcaatgagttcgcgcgctgccagaaccgcttcttcgacgttatttaccgcatgctcacagagtatttccagctcaaccagattcggcgcaatgatatcgctggcaggcaaaccgtgccgcacatgaaactctgcgacacccggtgcaacgatacagcctttttccggatgacccattaccggatcgcaaaaatatttcgcctgcggattcgcggctttcacctgacggacgataccgaggatatgttcaccctgctccgccgatcccagatagccacttaacacggcatcacaggtgtgtaatttatcaatggcggcaatgccttgcacaatttcggttaaatggctgggcggcatcacgcagccagtccatttgccgtattgggtgtgattagaaaattgaacggtgttcagcggccagacgttcgcgcccaggcggcgcataggaaactctgccgcactgttacccgcatgaccataaacaacgtgagactggatagcgagaatatttttcatcatgttccctgtataaaacaccagggggagtgatttctcactccccctttccacttaatgcattatttccagcaaatcagacagtaattctttttgccgcgacgcagtaaggtaaaacgaccaaacagacgatcttcttctttaaagaagtattcaggatcggactgtttttcaccgttaatggtgatggcattggaggcgatagttttacgcgcctgaccacgggaaggttgcagttcagaatcgaccagcgcctgcatcaggtctgcgcccttttccatctcaaccatcggtacgccgtcctgcgccagctgttcgaagtccgcttcactcagcgcactcaaagaaccgctgaacaggcattcggtaatacgttttgccgcctgtaaaccgtcttcaccgtgaaccagacgagtcacctgctccgccagtacatactgggcgcgcggtgctttaccgctgtttttatcttcttcttccagggcgttgatctcttcaatgctcataaaggtgaagaacttcaggaagcggtaaacgtcggcatccgcagtgttgatccagaactggtagaatttgtacgggctggttttcttcggatccaaccagactgcgccgccttcagttttaccaaatttggtgccatctgctttagtgatcagcggaacggtcaggccaaacacctgattctgatgcagacgacgggtcaggtcgataccagaagtgatgttaccccactggtcagaaccaccaatttgcagcaccacaccgtactgtttgttcagacaggcgaagtcataaccctgcaacaggttgtaggaaaactcagtgaacgaaatcccctgatcttcacggttgagacgctgcttaaccgcttctttgttgatcatctggttaacggagaagtgtttgccaatatcgcgcaggaaggtcagcacattcatattgccgaaccagtcatagttgttcgccgcgatagcagagttttctccacagtcgaaatcgaggaacggggcaacctgcttacggattttgtccacccactcctgaacagtttcttcggtgttcagcttacgctcggcagctttgaagctcgggtcgccaatcagacccgtcgcgccgcctaccagcgcaaccggcttgtggcccgcctgctggaagcgtttcaggcataacaatggaacaagatgccccaaatgcaagctgtcagcggtaggatcgaagccgcaatagagcgcgatcgggccttgcgccagtcgctctgctaacgcttcctcgtccgtcacctgggctaccagcccccgctcttgcaattgtttaatcaagttactgcttgccatcaaaatctccatgtatataacgactgcacctttgccggtacacgacttttcgccagatgcgaaagagacatagaataaagtgccagaatcaggagtaccagcgattaaagcaagatttttgcatcttttcagggtgcaagacgatcaatcttccacgcatcattttctcgctggtacaaaaagcggtcatgcaggcgatgctcaccgccctgccagaactcaatctgttcaaggctgacgcgaaaaccgccccaaaagctcggcaatggcacttcgccctgttgaaacttctgcttcagctccaggaatttactttcaaggataccgcgggcagaaatgcgactggactgcttcgaaacccatgcaccaatctggctatcacgcgggcggctatgaaaatatttcatcacttcgagagtcgaaagtcgttctgctttaccgatcaccatcacctggcgttcaagggtatgccacgggaacagcaggctaacgcgcggattattttcaatttgatgtgctttacggctaccgaggttggtgtaaaacaccatgcctttttcgtcgtaatgtttgagtaaaacgatgcgttgataaggctgagcatgttcatccacggtagcgaccaccatcgcggtagggtctgccagtttggcttcacacgcctgagagagccaacgttcaaaaagggttaatggatcggcgggaagatcgcgacggcgtaacccgcctttggtgtattcacggcgcagatgcgcgatttgctgcaattcgtcgttatcagacatggttttctttacggattgtcagtgggtgacgctattgtgcgccgcccctggaaaaatctcaacgctgtggattttgtaactgacagttattcaatacgatgcggtcgcgtttatagacagtcgcttcatcgcctttcgaccagaaaacatagattccgtcagtgtaacgtgcaccagacgctgaaatgccctgtttgagatgcagtagttgattatcgtaaacaaaactgacttcctggcgcggattattcagtttgaccgtcaacggtttttcatcacactggtattccagcgtagcggtttgcatgtgctcaaccagttgattgaacgcgctacagccggtgagaagcaccggcaaacagatcagtaacagttttttcatagacatttcccgaagactttcctggtctggagggcaatacgccctccctaacgttccaagtgtaacggcagacgcggtaagaaaaattcagttaactctgatatcacgggttagcagggaaaatagcccccagtaccgtctcctggcttgcgccagtgacggaaggcagatttcctggtaatcccgccagcgtccgccaggcaagccaggcgaaagccaatgcttccatgtcatcgccactaatgccaacggcatcggtggtggtgacttctgtgcctggcagtaatgccgccagacgcgccatgagtagcggattacgactacctccaccacataccatcaatcgttcgcagccaccgctcaacaaaacttgttcagaaatggtcacggcggtgagttctgccagtgtggcctgaacatcacggggatcaacacccggaaaatggcgtaaatggcgctccagccagccgtagttaaagtattcgcgtccggtgcttttcggtgcaggttgcgagaaatatgggtcgctgagcatattttgcagcagtgggagaataactttacccgcccgtgcccactcggcatctttatcgtaaggtttaccggcctgacgccagatccaggcatccatcagcatgttaccaggaccggtatcgtagccgccaaccggctgcccaggaatgagcagtgacagattggcgatgccgccaatattgagcaccattcgtcgctcggttgggtgacccagcaaggcatgatggaacgcaggtaccagcggtgcgccttgtcctcccaaggcaatatcgcgacggcgaaaatcaccgacaaccgtaattccggtgcgtgccacaatttgattgttatcgccaatctgtaaagtgtgtggttccacgcccgtcggttcatgccagacggtttgaccgtgacagccgatcgcaactatatctctcgcctgcaggttttgttccttaagcaaggcattgaccgcatcagcaaaaagtcgcccgagttgagtatcaagctgtccaaactgcgaaagtgtaagctgctggccctggcaaatatccagtacagcctgtttcagagacaccgggatcggccagctcaagcttgccagctgtgcgacccggtgttcatctattgtcgccaacacaacatcaacaccatcaaggctggtgcctgacataacgccaataaagcggcccgatttcatagttcatcctttttcaatctgacgtttgcgcaccactcaaacataaacttttcgtgaataccatgcggaatgaccgatttttaccgttggtagtaaaacattatcttcaaatcaataatcatcatgaatgttttgtttataattggttgatcctactttcattatgatttgctcatatttggtagaacatgtaaccatggattcacatatgccatatactttgaccatgagggatgcttgcgtggcgtttcatggtgaacaggagatttttcaatgattaaacgcgtattggttgtttcaatggtaggtctgtctcttgtcggttgtgttaataacgacaccctgtcaggggatgtttataccgcttctgaagcgaaacaagtacagaatgtcagctatggcaccatcgttaacgtacgtccggtacagattcagggcggtgatgattccaacgttatcggtgcaattggcggtgctgttcttggtggtttcctggggaatactgttggtggcggaaccgggcgttctctggctactgcagcaggcgctgttgcaggtggcgtagctggtcagggcgtacagagtgcaatgaacaaaacgcagggtgtcgagctggaaattcgtaaagacgatggtaataccatcatggtggtacagaaacaaggcaacactcgtttctctccgggccaacgtgtcgtactggccagcaatggcagtcaggtgaccgtttctccgcgctaaataagtttgcgtgtggtcaggttactgaccacacgcccccttcatttcaccctttggcctgtaactcaatgatattatgctcaagttttgcgatgagcgtaatcagttgctccagttcctctgcggagatgccatgtaatatttccgcgcgggttttgttaataacagcttccatttcgctgatcagtggctctgccttttccgtcagtttaatacgtttagcccgacgatcgctggcacaagtttgacgcgaaattaacccttttcttccagttggtccagagtacggaccagtgatggctgctcgatgccaatcgcttttgccagttgaatttgcgactggtctggaggtaactgatggatattgtgtaacgtaacccaatgggtttgtgttaactccagcggtttcaggcgatggtctatcagagcacgccatatgcgcaccaaccgtgccagatcagaacctagtggcgattccaatttcatctccttataattagcttgctaagatattatgcggcttttagaatagtgtgcagcaattgtattgctaaaacaaatgtattgctgcatttggttaccgtcagacatatttttcagaaattgcgcgtaaatttttcgcacttaaagaatatttattaatctaacgcaatatattcggtcgtaaaggaatctactttgtgaagtttatgctcaatgcaacaggattgcccttacaagatctggtgttcggtgcgtccgtctattttcctccgtttttcaaagccttcgcgtttggattcgtcatctggcttgtcgtacaccgcctgcttcgtggctggatctacgccggtgacatctggcatcccttgttaatggatttatcgctgtttgcgatttgcgtttgccttgctctggcaatactgattgcgtggtaactatgtcaattaaaacaattaagtatttctcaacaatcattgtagcgatagttgcggttcttgccggatggtggctgtggaattattacatgcaatctccgtggacacgcgacgggaaaatacgcgcagaaaaggtttctatcaccccacaggtgtcgggacgtattgttgagctgaatataaaagacaaccaactggttaacgcgggggatcttctgctcacgatcgataaaacgccctttcagatcgccgagctgaacgcacaggctcagctggcgaaagcgcaatctgacctcgcaaaagccaataacgaagcgaatcgtcgtcgtcatctctcacaaaattttatttctgccgaagaactcgataccgctaacctcaatgttaaagcgatgcaggccagtgttaatgccgcacaggccacgctgaaacagacacaatggcaactggcgcaaacggaaattcgcgccccggtgagtggttgggtgactaacctcactacccgcatcggcgattacgctgacaccgggaaaccgctgtttgcccttgtcgacagccactcgttttacgtcattggttatttcgaagaaaccaagttgcgccatatccgcgaaggtgcaccagcacaaattaccctctatagtgataacaaaacgttacggggtcacgtttccagtatcggtcgggcgatttatgatcaaagcgttgaaagtgactcaagccttattccggatgtgaaacctaacgtcccctgggttcgtctcgcccaacgcgttcccgtccgctttgcgctggataaagttccaggcgatgtcacgctggtgtcgggcaccacctgtagcattgccgtaggtcaataatgaacgcatcgtcatggtccttgcgcaatttgccctggttcaaggccacgctggcgcaatggcgttatgcgttacgcaataccattgccatgtgtctggcgctgacggttgcctattatttgaatctggatgaaccctattgggcgatgacctcggctgcagtggttagctttcccaccgttggcggtgtcatcagcaaaagcctcggacgcatcgctggcagtttactgggagccattgcggcactgcttcttgccgggcatacgctcaatgagccgtggttttttctattgagcatgtcggcgtggcttggcttttgtacctgggcctgtgcgcacttcacgaataacgtcgcgtatgcatttcaactggcgggctacacggctgccatcatcgcctttccgatggttaatattactgaggccagccagctgtgggatatcgctcaggcgcgcgtttgcgaggtgatagtcggtattttgtgcggcggcatgatgatgatgatcctgcctagcagttccgatgctacagcccttttaaccgcattgaaaaacatgcacgcccgattactggaacatgccagtttactctggcagcctgaaacaaacgatgccattcgtgcagcacatgagggggtgattgggcagatactgaccatgaatttgctgcgtatccaggctttctggagccactatcgttttcgccagcaaaacgcgcggcttaatgcgctactccaccagcaattacgtatgaccagtgtcatctccagcctgcgacgtatgttgctcaactggccctcaccgccaggtgccacgcgagaaattctcgaacaattgctgacggcgctcgccagttcgcaaacagatgcttacaccgtcgcacgtattatcgccccgctacgcccgaccaacgtcgccgactaccggcacgtcgccttctggcagcgactacgttatttttgccgcctttatctgcaaagtagtcaggaattacatcgtctgcaaagcggtgtagatgatcatgccagactcgcacggacatctgctctggctcgtcataccgacaacgccgaagctatgtggagcgggctgcgtacattttgtacgttgatgatgattggcgcatggagtattgcatcgcaatgggatgccggtgccaatgcattaacgctggcagcaattagctgcgtactctactccgccgtcgcagcaccgtttaagtcgttgtcactgctgatgcgcacgctggtgttactttcgctattcagctttgtggtcaaatttggcctgatggtccagattagcgatctgtggcaatttttactgtttctctttccactgctggcgacaatgcagcttcttaaattgcagatgcccaaatttgccgcactgtgggggcaactgattgtttttatgggttcgtttatcgctgtcactaatcccccggtgtatgattttgctgattttcttaacgataatctggcaaaaatcgttggcgttgcgctggcttggctagcgttcgccattctgcgtccaggatcggatgctcgtaaaagccgccgccatattcgcgcgctgcgccgggattttgtcgatcagctaagccgccatccaacactgagtgaaagcgaatttgaatcgctcacttatcatcacgtcagtcagttgagtaacagccaggatgcgctggctcgccgttggttattacgctggggtgtagtgctgctgaactgttctcatgttgtctggcaattgcgcgactgggaatcgcgttccgatccgttatcgcgagtacgggataactgtatttcactgttgcggggagtgatgagtgagcgtggcgttcagcaaaaatcactggcggccacacttgaagaattacagcggatttgcgacagccttgcccgtcatcatcaacctgccgcccgtgagctggcggcaattgtctggcggctgtactgctcgctttcgcaacttgagcaagcaccaccgcaaggtacgctggcctcttaattacttaattacaccacaggcatagcgttcaccgccaccgcccagcggtttaggttgatcggacatattatcgccgccaacgtggaccatcagcgctttgtctttgatttcatccagtgatttcagacgaggcgcgatgacggcatcggtagctttgccgtcattattgacgaccagtgcaggcagatcgcctaaatgcccggcaccttctggcccttcatgtttaccggtattttgtggatcaagatgcccgcctgcggattccgcggcgctggctttgccatctttggtggctggctggcagcttcctttggcatgaatatggaagccatgttcaccggggggtaatgctttcagatcgggcgaaaactccagacctttatcggtttcagtaatggtgacgctaccaattgactgccctacccttgcgacgtgacgaggttcatctcgactttttcactggcagcttgtgcgccggttgcaacaaccagcgccagaatagccagactaaaacgtttcataggacctccgttcattgtgcattcctgaataagtgtaaaccagtgacacatttttgaacggcggctattcctaaaagtgcttacggtacgtcgtaccccagtgccgctttacggatacgaaaccattgttgacgggtcattttcagtgtttctgcttcgacagctgcccgtacgcgctcaattttacctgaaccgataattggcagcggctgcgatggtaaacgtaatacccaggcgtaaaccacctgttcaatcgagcccgcgtttaactcctctgccaccacagccagttcatcacgcagctgctggaaataatcatcattaaacagacgaccaccaccaaggcaggaccacgccatcggacgaacacgcagttgttgtagttggtcgagcgtgccatccagcagtaacggctgatgcaccggggatatttccacctgattagtggcaagggtaaacggcagacgtgattgcaacagggcaaattgcgcaggcgtaaagttcgatacgccaaaatgacgcactttgccgctctgatgcagatgtttgaacgcgtccgccacttcatcggcatccattaacgggtctggtcggtggattaacagcagatccagatgatcggtcgcgagattaattagcgactgttcggcgctcttaatgatgtgatcgcggtcagtgatgtaatgaccaatgacgttttcttcacgcgcggtcgtcgcgataccgcatttactgacgatttccatccgttcacgcaggtgaggtgccagtttcagtgcctcgccaaacgccgcttcgcactgatagccaccataaatatcagcatggtccacggtggtcacgccgagatccagatgctcttcaataaaactgaccagctggcgggcggacatattccagtccatcaatcgccagtagcccatcacaaaacgggaaaactccgggccttgcggcgcaatagtaatacgctgaaccataatcacttcctcttatcagatatgagaggagtatacgcaagattaggttcaaaagagtgatggttgctccggttcgtctgatgacgctggcttatttgcgcgtaatttgcgcattaatcgctgccgacaaaggcgcagcacctcttgtttttcgccatcgctcattttattccagttaaaacgctcatcacgactacgaaaacagccgcgacaaaacccgcgttcgtcagactggcaaattccccggcacgggctctggacgggaaagaactctaattgctccgccacttcgccctcctcagataagattattaccattattgaagctgttaatgtccaaagtagcaactttgcttgcactagaccgactggtctactacactccaacgcatgaacaaacacaccgaacatgatactcgcgaacatctcctggcgacgggcgagcaactttgcctgcaacgtggattcaccgggatggggctaagcgaattactaaaaaccgctgaagtgccgaaagggtccttctatcactactttcgctctaaagaagcgtttggcgttgccatgcttgagcgtcattacgccgcatatcaccagcgactgactgagttgctgcaatccggcgaaggtaactaccgcgaccgcatactggcttattaccagcaaacactgaaccagttttgccaacatggaaccatcagtggttgcctgacagtaaaactctctgccgaagtgtgcgatctgtcagaagatatgcgcagcgcgatggataaaggtgctcgcggcgtgatcgccctgctctctcaggcgctggaaaatggccgtgagaaccattgtttaaccttttgtggcgaaccgctacaacaggcacaagtgctttacgcactgtggcttggcgcgaatctgcaggccaaaatttcgcgcagtttcgtgccactggaaaacgcgctggcccatgtaaaaaacattattgcgacgcctgccgtttagcaggcattttttatcaccagacgaccgggagcctttatgtcatctgaaaaactgtattccccactgaaagtgggcgcgatcacggcggcaaaccgtatttttatggcaccgctgacgcgtctgcgcagtattgaaccgggtgacattcctaccccgttgatggcggaatactatcgccaacgtgccagtgccggtttgattattagtgaagccacgcaaatttctgcccaggcaaaaggatatgcaggtgcgcctggcatccatagtccggagcaaattgccgcatggaaaaaaatcaccgctggcgttcatgctgaaaatggtcatatggccgtgcagctgtggcacaccggacgcatttctcacgccagcctgcaacctggcggtcaggcaccggtagcgccttcagcacttagcgcgggaacacgtacttctctgcgcgatgaaaatggtcaggcgatccgtgttgaaacatccatgccgcgtgcgcttgaactggaagagattccaggtatcgtcaatgatttccgtcaggccattgctaacgcgcgtgaagccggttttgatctggtagagctccactctgctcacggttatttgctgcatcagttcctttctccttcttcaaaccatcgtaccgatcagtacggcggcagcgtggaaaatcgcgcacgtctggtactggaagtggtcgatgccgggattgaagaatggggtgccgatcgcattggcattcgcgtttcgccaatcggtactttccagaacacggataacggcccgaatgaagaagccgatgcactgtatctgattgaacaactgggtaaacgcggcattgcttatctgcatatgtcagaaccagattgggcggggggtgaaccgtatactgatgcgttccgcgaaaaagtacgcgcccgtttccacggtccgattatcggcgcaggtgcatacacagtagaaaaagctgaaacgctgatcggcaaagggttaattgatgcggtggcatttggtcgtgactggattgcgaacccggatctggtcgcccgcttgcagcgcaaagctgagcttaacccacagcgtgccgaaagtttctacggtggcggcgcggaaggctataccgattacccgacgttgtaatccaacattgcgagcggcgtaaagccgccgctatactaaaacaacattttgaatctgttagccattttgaggataaaaagatgcgtcttcttcataccatgctgcgcgttggcgatctgcaacgctccatcgatttttataccaaagtgctgggcatgaaactgctgcgtaccagcgaaaacccggaatacaaatactcactggcgtttgttggctacggcccggaaaccgaagaagcggtgattgaactgacctacaactggggcgtggataaatacgaactcggcactgcttatggtcacatcgcgcttagcgtagataacgccgctgaagcgtgcgaaaaaatccgtcaaaacgggggtaacgtgacccgtgaagcgggtccggtaaaaggcggtactacggttatcgcgtttgtggaagatccggacggttacaaaattgagttaatcgaagagaaagacgccggtcgcggtctgggcaactaatctcctgccgggcgtgaactcatcgcgcccgcatctttactgcatcgacaagtaatatttgtcataatgcgcgctgcaatttatccgtattaagagaatcagatgtccgataacgctcaacttaccggtctgtgcgaccgttttcgtggtttttatcctgttgtgatcgatgttgaaacagccggatttaacgccaaaaccgatgcgctgcttgagattgccgccatcaccctgaaaatggatgaacaaggctggctgatgccggacaccacattacatttccacgtcgaaccatttgtcggcgcaaatttgcagccagaggccctcgccttcaacggcattgacccgaacgatcccgatcgcggcgcggtcagcgaatacgaggcgctgcacgaaatttttaaagttgtacgtaaaggtattaaagcgagcggctgtaaccgcgccattatggtggcgcacaatgccaattttgatcacagctttatgatggccgccgcagaacgcgcctcactgaaacgtaacccgttccaccctttcgccacttttgacactgctgcactggccgggctggcactcggacaaaccgtattgtcaaaggcttgccagaccgctggcatggacttcgacagcacccaggcgcactccgcgctgtacgacaccgaacgcactgctgtgctgttttgtgaaatcgtcaaccgctggaaacgtctgggaggctggccgctacctgccgccgaagaggtgtaatcgagtcgatgcctgatgacatgcaatgattcaggcatctatagtgaggctattccacgcatcaagcatgatattcacggggaatagcgttaatggcagataatccagacccttcatcgctcctgccggacgtgttttcaccggcgacccgcgactggtttcttcgcgcctttaaacagccgaccgctgtccagtcgcaaacctggcatgtggcggcgcgaagcgaacatgcgctggtgattgcaccgaccggctccgggaaaacgctggcagcatttctctacgccctcgatcggctcttccgcgaaggcggcgaagatacccgcgaggcgcataagcgtaaaacctcacgcatcctctatatttcaccgataaaagctctgggcaccgacgttcagcgcaacttgcagctcccgttgaagggtattgccgatgaacggcggcggcgcggcgaaacggaagtcaatcttcgcgtagggatccgtactggcgatacgcctgcacaggaacgcagcaaactcacccgtaatccgccggatattctgatcaccacacccgaatcactctatctgatgctgacctcccgcgcgcgcgaaacgctacgcggcgtcgaaacggtaattattgatgaagtccacgcggtagcgggcagtaaacgtggtgcgcatctggcgttaagtctggagcggctcgatgcgctgctccacacctcagcacagcgaattggcctttctgccactgtgcgctcagccagcgatgtggcagcatttcttggtggcgatcgcccggttacggtagtcaacccgcccgcaatgcgccatccgcagatacgaattgtcgtaccggtcgccaatatggatgatgtctcatcggtcgccagcagcaccggcgaagacagccatgccggccgggaaggctccatctggccatatattgaaacgggtatccttgatgaagtgttgcgccatcgctcgaccattgtctttactaattcacgtgggctggcggaaaaactgacggcacgattaaatgagctttacgccgcacgcttacagcgttccccgtctatcgccgttgatgcggcccatttcgagtcgacctccggcgcaacctctaaccgtgtacaaagtagcgacgtttttattgcccgctcacaccacggctccgtctctaaagaacaacgagcaatcaccgagcaggcgctgaaatcgggtgagttacgctgcgtggtcgcaacctccagtctcgaactggggattgatatgggcgcagtggatctggtgattcaggtggcaacgccgctttctgttgccagtgggttacaacgcattggtcgcgccggacatcaggttggcggtgtatctaaagggctgtttttccctcgtacccggcgtgacttagtcgattccgcagtcattgtagagtgtatgttcgcaggcaggctggaaaacctgacaccgccgcataatccactcgacgtccttgcgcagcaaaccgttgccgccgcggcgatggaggcattacaggtagacgaatggtactcccgcgtacgccgtgccgcaccgtggaaagatctgccaagacgtgtttttgacgccacgctggatatgctttccgggcgctatccctctggcgatttttctgcttttcgccccaaactggtctggaacagggagaccgggatattgaccgcccgacctggcgctcaattgttggcggttaccagcggcggcaccattccggatcgtggcatgtatagcgtgttattacccgaaggtgaagaaaaggccggttcgcggcgggtgggtgaactggatgaggagatggtatatgagtcgcgggtgaacgacattatcactctcggcgctacctcatggcggatccagcaaatcacccgcgatcaggtgattgtgactcctgctccgggtcgttctgcccggctccccttctggcgtggtgaaggtaacggacgtccggctgaattaggcgagatgatcggcgattttcttcatttgctggcggatggcgcgttcttttccgggactattcccccgtggctggcagaagaaaatacgaacgccaatattcaggggttgattgacgagcaacgcaacgcgacgggcatcgttccggggagtcgccatctggtcctcgaacggtgccgtgatgaaattggcgactggcgtattattttgcactctccctatggaagacgggtgcatgaaccctgggcgctggcgattgccgggcgaatacatgccctatggggcgctgacgcgtctgtggtcgccagtgatgacggcattgttgcgcgcattcctgacactgatggtaaattgcccgacgccgcgatttttttgtttgaaccagaaaagttgctgcaaattgtccgcgaaggcggtaggcagctcggcacttttcgccgcccgttttcgcgaatgcgccgcgcgggcattattaatgccggggcgcactccgggccatcgcaccccgctttggcaacaacggctgcgcgccagtcagttgctggaaatcgctcagggatatccggattttccggtcattctcgaaaccctacgcgaatgtctgcaagatgtttatgatcttcccgcactggaacgtttgatgcgtcgcctgaacggtggcgaaattcaaatatccgatgtaacgaccactacgccctcgcctttcgccacaagtttattgttcggctatgtcgcggaatttatgtaccagagcgacgccccgctggcagagcgccgggcatccgtactgtcgctggacagcgagttactgcgcaatctactcggacaggtcgatccgggggaattactcgacccgcaggtcattcgccaggtggaagaagagttgcaacgactggctcctggcagaagagcgaaaggtgaagaaggattgttcgacctgctgcgcgaactggggccaatgaccgttgaagacctggcgcaacggcatacaggcagcagtgaagaggttgcgtcgtatctggaaaatcttcttgcagtaaaacgaatcttcccagcgatgattagcggacaggagcgtcttgcctgtatggatgatgccgccaggctgcgtgatgccctcgcgtacgactaccagagtcattgccagagatttatttacatagagtcagttacccgcttcgcgatctctttctgcgctatctccgggctcatgctctggtcacggctgaacaactggctcatgagtttagtctcggtattgccattgtcgaagagcagcttcagcaactgcgtgaacagggtctggtgatgaatctgcaacaagacatctgggtgagcgatgaagtatttcgtcgtctgcgtttgcgctcgctgcaagccgccagagaagcgacgcgtcccgttgcagccacgacctatgcgcgattgctgctggaacgtcagggcgtattacccgccaccgatggtagcccggcgctctttgcctcaacatcgccaggcgtttatgagggcgtagatggcgtgatgcgggtgatcgaacagcttgccggagtcggtttacccgcctcactctgggaaagccagatcctgcctgcccgcgtacgcgactattcgtcagaaatgctcgatgaattactggcaaccggtgcggttatctggtcggggcaaaaaaaactgggtgaagatgacggcctggtggcactgcatctacaggaatatgctgcagaatcgttcactcccgccgaagcggatcaggcgaatcgttcggcgctgcaacaagcgatagtcgctgttctggctgacggaggagcctggtttgcacaacaaatcagccaacggatacgcaacaaaatcggcgaatcggttgatctctctgccctgcaagaggcgttatgggcgctggtctggcaaggcgtcatcaccagcgacatttgggcaccgttacgcgccctcacccgcagcagttccaacgcacgcacctcaactcgccgcagtcaccgggctcgtcgtggacgtcctgtctatgcgcaacccgtctcgccgcgggtatcttacaacacaccaaatctggctggacgctggtcgttattgcaggtggagccactaaacgataccgaaaggatgctggcgctggcggaaaatatgctcgaccgctacggcatcatcagtcgtcaggcggtgatagccgaaaatatccctggcgggtttccatcgatgcaaacgctttgtcgaagtatggaagactccgggcgaattatgcgaggtcgttttgtagaaggtctgggtggcgcgcaattcgctgaacgtctgactattgaccgattgcgcgatctggcgacacaagccacgcaaacgcgccactatacaccagtggcgctctctgccaacgatccggctaatgtgtggggaaatcttctgccctggcctgcacatccggcaacgctggttccaacgcgtcgggcgggtgcgctggtggtcgtttctggcggcaaattgttactctatctggcgcaaggtggcaaaaaaatgctggtctggcaggaaaaagaggaattactcgccccagaggttttccacgcgctgactaccgcactgcgtcgcgaaccacggctgcgctttacgctaacagaagtgaatgatctaccggtccggcaaacgccgatgtttacgctgctgcgtgaggcgggattttcaagttcgccacaagggctggattggggatagagaaaggactgacggatgcccgttcgcatccgtcagtattgcaggacggattattccgcgtcgggctcttcagacttgtatttagcggcagtttctttgatcagctgctgcagttcgccacgctgatacatttcgatcacgatatcacaaccgccgaccagctcgccgtcaacccacagttgcgggaaggtcggccagttagcatatttcggcagttccgcacgaatgtccggattctgcagaatatcaacataggcaaaacgttcgccacatgcggcaagcgcctggactgcctgggcagagaaaccgcagctcggcagtttcggtgaacctttcatgtacagcaggatcgggttttcagcaatctggcgttggattttttcgatagtggtgctcattgtcttgcttcctcaaacttctttacggcagtaatctgacattgtagcgggtcagtgcggcatcggaaaataacattttcatcacgcttttgctattttatccctttgctctatttgttgcatttcaaatattcgtttcttctctgatgccggcaaactggcgtatttacaaccatttttagctttcactgctacatttttttgcgctcgccaacgaaacgtattttttaacaataaaagctattaactttctcttcttctatgcattagaatcatcaagttttgtaaatcagacgcaggcatgatagacctgccttaacagagggacgctcagtggcgcggataaaccgtatttcgatcacgctctgtgctttactttttaccaccctgcctttaacgcctatggcccatgcttcaaagcaagccagggagagttctgctaccactcatatcaccaaaaaagcagataaaaagaaaagcacggcaaccaccaaaaagacccagaaaacagcgaaaaaagccgccagtaaaagtacgaccaaaagcaaaaccgcttcttccgttaaaaaatcttccattaccgcttctaaaaacgccaaaactcgcagcaaacacgccgtcaataaaacggcctcagccagctttaccgaaaagtgtaccaaacgtaagggctataaatcgcattgtgtgaaagtcaaaaatgccgcgtcaggaactcttgccgacgcgcacaaagcgaaggtgcaaaaagctacgaaagtggcaatgaataaactgatgcagcaaattggtaagccatatcgttggggtggcagctcaccgcgtaccggttttgattgcagcggcctggtttattacgcttataaagatttggtgaaaattcgtattccgcgtacggcgaatgaaatgtatcacctgcgtgatgcagcgccaatcgaacgtagtgaactgaaaaacggcgacctggtctttttccgtactcagggacgcggcacagccgatcatgtcggcgtgtatgtcggcaacggcaaatttattcagtcaccgcgcacaggtcaggaaattcaaatcacttctctcagtgaagactactggcagcgccactatgttggcgctcgtcgggtaatgaccccaaaaacacttcgctaaaactttaccctgttgttacggcaacagggtaagttcatcttttgtctcaccttttaatttgctaccctatccatacgcacaataaggctattgtacgtatgcaaattaataataaaggagagtagcaatgtcattcgaattacctgcactaccatatgctaaagatgctctggcaccgcacatttctgcggaaactatcgagtatcactacggcaagcatcatcagacttatgtcactaacctgaacaacctgattaaaggtaccgcgtttgaaggtaaatcactggaagagattattcgcagctctgaaggtggcgtattcaacaacgcagctcaggtctggaaccatactttctactggaactgcctggcaccgaacgccggtggcgaaccgactggaaaagtcgctgaagctatcgccgcatcttttggcagctttgccgatttcaaagcgcagtttactgatgcagcgatcaaaaactttggttctggctggacctggctggtgaaaaacagcgatggcaaactggctatcgtttcaacctctaacgcgggtactccgctgaccaccgatgcgactccgctgctgaccgttgatgtctgggaacacgcttattacatcgactatcgcaatgcacgtcctggctatctggagcacttctgggcgctggtgaactgggaattcgtagcgaaaaatctcgctgcataataactgatggcaaatgcagcattgcctgatgcgcttcgcttaccatgccaacgcggatgaggcgttaacagcgcattcggcaagataaatcgcacgttgtcagcaactgtaacgcagaaggttatccttctgcgtttttgtttaattagctgttagcaacgcaaactgtttcaggttgttttctggctgacataaacaccagcaataatgccagtcccgcgacaatcgctcccatcaccggcacaaagctgtatcccagcccagcggaaattaccgcaccaccagcagctgctcccagcgcatttccaagattaaaggcaccaatattgactgatgaagacagacccggcgcttcactggcgacacgcatcacgcgcatctgtaacggcggtacgaccgcaaaggttgctgcgccccacaccaccatgctaatagctgcgccgaactcattgcgggccaggaacgggattgccagcataatcaccatcaacaacaacaaaaagcctttcaacgtgccgttaactgaacgatctgccagtttgccgccgagatagttaccgatagagaatccgacaccaatcagcaccagcattgccgtgacgaacactggtgttgcgtgggtaatactttgtagtaccggagagatataggtgtagagagtaaacattgcaccagctcccagtaccgtcgtcagcaatgcagacagcacctgcggacgcattaataccgccagctcttttttcacttcaggtcgtgcccctgcaccacctttaggtaatgagaagaacagacttaccattgaaatcactcccagccccgccgttgccagaaatgacatccgccagccgatggtttcacccaaccaggtcgccgccggcacgccaccgatatttgccagggttaaccccataaacatagtggcaactgcgctggcctgtttatgttttggcaccacgcttgcggccacgactgaacccaaaccaaaaaatgctccgtgattcaggctggtcaaaatgcgtgaaagcatcagggtcatataatccggcgcgatggcggaaagtacgttgccgagcgtgaaaattgccatcaggaaaatcaacgcactgcggcgggcacgatgagaaagtagaagcgtcatcagcggcgcgccaaccattacgccaactgcataggcactgattaacattccggcagcgggaatcgagacatccacaccgcgcgcaatgacgggcaacaaacccattggcgagaactccgttgtcccgataccaaacgcgccaatcgccagcgccagcaacggatagttaattttcatgccttatctccacctcttcgcgtcattacgcgatattcattaaagtggcgaaagcatgacagcaatcacaaaaaaatgaaaataacaaaaagagaaaacacttttgccattttgctaacaaacaggaaggagatgcgagggagaacgcgctccctcgagaggaaatcagtgcagcgcggcagtcaaacccacggctacgatcaaaccgaggacgataatcgttgttaccagtgaaaatttaaggtcggtgctcatcaagttttctcctttttattaccacacaaaaagtgatattacgcatttttacacactgtgatgaaaaaatctcccgtcatttataatgataagtgtttttaccacttccccttttcgtcaagatcggccaaaattccacgcttacactatttgcgtactggccattgaccccttcctgacgctccgtgtcgtttttccggcgtaccgcaacacttttgttgtgcgtaaggtgtgtaaaggcaaacgtttaccttgcgattttgcaggagctgaagttagggtctggagtgaaatggaatggcaacaataaaagatgtagcgaaacgagcaaacgtttccactacaactgtgtcacacgtaatcaacaaaacacgtttcgtcgctgaagaaacgcgcaacgccgtgtgggcagcgattaaagaattacactactcccctagcgcggtggcgcgtagcctgaaggttaaccacaccaagtctatcggtttgctggcgaccagcagcgaagcggcctattttgccgagatcattgaagcggttgaaaaaaattgcttccagaaaggttacaccctgattctgggtaatgcgtggaacaatcttgagaaacagcgggcttatctgtcgatgatggcgcaaaaacgcgtcgatggtctgctggtgatgtgttctgagtacccagagccgttgctggcgatgctggaagagtatcgccatatcccaatggtggtgatggactggggtgaagcaaaagctgacttcaccgatgcggtcattgataacgcgttcgaaggcggctacatggccgggcgttatctgattgaacgcggtcaccgcgaaatcggcgtcatccccggcccgctggaacgtaacaccggcgcaggccgccttgccggttttatgaaggcgatggaagaagcgatgatcaaggtgccggaaagctggattgttcagggtgactttgaacccgaatctggttatcgcgccatgcagcaaatactgtcgcagccgcatcgccctactgccgtcttctgtggtggcgatatcatggcaatgggcgcactttgtgctgctgatgaaatgggtctgcgcgtcccgcaggatgtttcgctgatcggttatgataacgtgcgcaacgcccgctattttacgccggcgctgaccacgatccaccagccaaaagattcgctgggtgaaacagcgttcaacatgctgttggatcgtatcgtcaacaaacgtgaagaaccgcagtccattgaagtgcatccgcgcttgattgaacgccgctccgtggctgacggcccgttccgcgactatcgtcgttaatcacccgttgcgggagtctcttccggctcccgcagccactccttattcagcgtctcactatcgccgagatactcaagcagccaggttaacgcaggcgacatatcattttgctgccatgtcagacaacatgccgaatccgggaaggggttttccaattcaagtgctacccacttcccctcattaagccacggtttggcgaaatgtgttggcaccatccctatgcataatcctgccgagatacaggttgccgatgattcccagtcaggcacgacaactcttttttggttatccagcaaccaggtaatacgtttaggtagcgttcgcgaggtgtcttcgcgcaccaacgacggccagttgcgcaacgtatcatcgctgaatgggccatccatcaacgccagcgggtggtggctggcaacaacgcaactccagcttagcatccccatatcccggaaggcataacgaccgcctaccggaatcgcgcgtgttgcgccaatcgccagttccacgcgcccgtcggaaagcgcatcccagacaccgttgaacacttcctgaaagacaagaagttcgacatcatcaaaatggcgataaaaatcaacgatcatctgccgtgtacgttctggcctgacaatattatccactgcgatagctaactgaccgcgccagccgttcgctatctgctgacattgctggcgggtgatctgcatttttttgacaacagagcgcccttctttgagaaaccacgctccagcagcggtcagctccacatcacggtgccgtcgttcaaagagcggcaccgccagccactcttccagctgacgcacggtatagctgaccgcagaaggaacgcgatgcagctcctgtgccgcagcgctaaaactaccattacgcgctaccgcatcaacaacttcgagtgaatattctgaccacatagtctgcctgcaaaatttttgaaaccagtcatcaaatattaccgtttcacaacactaatttcactccctacactttgcggcggtgtttaattgagagatttagagaatatacatgcaacctgggaaaagatttttagtctggctggcgggtttgagcgtactcggttttctggcaaccgatatgtatctgcctgctttcgccgccatacaggccgacctgcaaacgcctgcgtctgctgtcagtgccagccttagtctgttccttgccggttttgccgcagcccagcttctgtgggggccactctccgaccgttatggtcgtaaaccggtgttattaatcggcctgacaatttttgcgttaggtagtctggggatgctgtgggtagaaaacgccgctacgctgctggtattgcgttttgtacaggctgtgggtgtctgcgccgcggcggttatctggcaagcgttagtgacggattattatccttcacagaaagttaaccgaatttttgcgaccatcatgccgctggtgggtctatctccggccctggctcctctgttaggaagctggctgctggtccatttttcctggcaggcgattttcgccaccctgtttgccattaccgtggtgctgattctgcctattttctggctcaaacccacgacgaaggcccgtaacaatagtcaggatggtctgacctttaccgacctgctacgttctaaaacctatcgcggcaacgtgctgatatacgcggcctgttcagccagttttttgcatggctgaccggttcaccgttcatccttagtgaaatgggctacagcccggcagttattggtttaagttatgtcccgcaaactatcgcgtttctgattggtggttatggctgtcgcgccgcgctgcagaaatggcaaggcaagcagttattaccgtggttgctggtgctgtttgcagtcagcgtcattgcgacctgggctgcaggcttcattagccatgtgtcgctggtcgaaatcctgatcccattctgtgtgatggcgattgccaatggcgcgatctacccgattgttgtcgcccaggcgctgcgtcccttcccacacgcaactggtcgcgccgcagcgttgcagaacactctacaactgggtctgtgcttcctcgcaagtctggtagtttcctggctgatcagtatcagcacgccattgctcaccaccaccagcgtgatgttatcaacagtagtgctggtcgctctgggttacatgatgcaacgttgtgaagaagttggctgccagaatcatggcaatgccgaagtcgctcatagcgaatcacactgatctatatcgatatacttatacttaggctgctaacaaatttgttgtatgattgaaattagcggcctatactaatttcgagttgttaaagctacgataaatattatgtttttacggggacaggatcgttcccgactcactatggatggtcatttcggcaaaggttcctcctttccctctgttctacgtcggattatagactcgcggttttttctgcgagatttctcacaaagcccaaaaagcgtctacgctgttttaaggttctgatcaccgaccagtgatggagaaactatgagttcatcgtgtatagaagaagtcagtgtaccggatgacaactggtaccgtatcgccaacgaattacttagccgtgccggtatagccattaacggttctgccccggcggatattcgtgtgaaaaaccccgatttttttaaacgcgttctgcaagaaggctctttggggttaggcgaaagttatatggatggctggtgggaatgtgaccgactggatatgttttttagcaaagtcttacgcgcaggtctcgagaaccaactcccccatcatttcaaagacacgctgcgtattgccagcgctcgtctcttcaatctgcagagtaaaaaacgtgcctggatagtcggcaaggagcattacgatttgggtaatgacttgttcagccgcatgcttgatcccttcatgcaatattcctgcgcttactggaaagatgccgataatctggaatctgcccagcaggcgaagctcaaaatgatttgtgaaaaattgcagttaaaaccagggatgcgcgtactggatattggctgcggctggggcggactggcgcactacatggcatctaactatgacgtaagcgtggtcggcgtcaccatttctgccgaacagcaaaaaatggctcaggaacgctgtgaaggcctggatgtcaccattttgctgcaagattatcgtgacctgaacgaccagtttgatcgtattgtttctgtggggatgttcgagcacgtcggaccgaaaaattacgatacctattttgcggtggtggatcgtaatttgaaaccggaaggtatattcctgctccatactatcggttcgaaaaaaccgatctgaatgttgatccctggattaataaatatatttttccgaacggttgcctgcctctgtacgccagattgctcagtccagcgaaccccactttgtgatggaagactggcataacttcggtgctgattacgatactacgttgatggcgtggtatgaacgattcctcgccgcatggccagaaattgcagataactacagtgaacgctttaaacgaatgtttacctattatctgaatgcttgtgcaggtgctttccgcgcccgtgatattcagctctggcaggtggtgttctcacgcggtgttgaaaacggccttcgagtcgctcgctaaaggctattctatcgccccctcttcgggggcgagttcagatcaggcttctgtacctggttgattcatggcattttctcgtgccgccagcacacgttctaccgtatctaccactgcctgagtttgtggatcaatttcaatgttgacgcgtgcgccgagttttttcttcccaagagtcgtgcgttccagtgtttccggaattaaatggacgcaaaaacgcgttggcgtgacttcgccgacggtcaggctaataccgtcgatgccaataaatcctttgtacaggatatatttcatcaactgactatcctggactttaaaccagatctggcgattattttccgaggttaatattttcgccacttcagcggtggtcataatatgacctgacattaagtgtccgccaatttcatcactgaatttcgccgcacgctcaacgtttacccaatcccccacttttaaatcgccaagattggtaatgcgtaacgtttctttcatcaggtcaaaactgacatggttgccgttaatttccgtcacggtcaggcagcaaccgttatgcgccacggacgcaccggtttccaggccgtccagcatgtggtcgggtaactccaccacatgcgtacgaaaatttggtttctcgtcaatcgacaccagttttgcggtgccctgtacaatccccgtaaacatacttacaactcctgaaatcagttaagacattctgttcagcacaatagcaggtggcaaacgcccttaccagtgaaggggtaagaatgactattttttcactggagaattaataaatcctcgctacaatagactgaatttcccctgcttcttctttttgctgcccattcaggcggctttttagtctctcatataactacaaataaaaggtgttcacgtgcagaagtatatcagtgaagcgcgtctgttattagcattagcaatcccggtgattctcgcgcaaatcgcccaaactgcgatgggttttgtcgataccgtgatggcgggcggctatagtgccaccgacatggcggcggtcgctatcggtacttctatctggcttccggcgatcctctttggtcacggactgctgctggcattaacgccggttatcgcgcaattaaatggttccggtcgacgtgagcgcattgcgcatcaggtgcgacaaggtttctggctggcaggttttgtttccgttctcattatgctggtgctgtggaatgcaggttacattatccgctccatggaaaacatcgatccggctctggcggacaaagccgtgggttatctgcgtgcgttgttgtggggcgcgccgggctatctgttcttccaggttgcccgtaaccagtgtgaaggtctggcaaaaaccaagccgggtatggtaatgggctttatcggcctgctggtgaacattccggtgaactatatctttatttatggtcatttcggtatgcctgagctcggtggcgttggttgtggcgtggctactgcggcggtgtactgggttatgttccttgccatggtttcttacattaaacgcgcccgctccatgcgcgatattcgtaacgaaaaaggcaccgcgaaacccgatcctgcggttatgaaacgactgattcaactcggtttgccgattgcgctggcactgttctttgaagtgacactgtttgctgtcgtggctctgttagtgtctccgctcggtattgttgatgtcgcaggacaccagattgccctgaactttagttcactaatgttcgtgcttcccatgtcgctggcggcagcggtaactatccgcgtaggttatcgtctgggtcagggctcaacgctggatgcgcaaaccgctgcgcggaccgggcttatggtgggtgtctgtatggcaaccctgacggccatattcacggtttcactgcgggagcaaatcgccctgttgtacaacgacaatcccgaggttgtaacgctggctgcgcatttgatgttgctggcggcggtatatcagatttctgactcaatccaggtgattggcagtgggattttgcgtggttataaagatacgcgttccattttctatatcacctttacggcttactgggtgctgggcttgccaagcggctatattctggcactgaccgatctggtcgttgaacctatggggccagcaggcttctggataggctttattattggcctgacgtcggcagccattatgatgatgctgcgtatgcggttcctgcaacgtctgccgtcagttatcattctgcaacgagcatcccgctaataaagacaaggcgcaaccttcacgggttgcgcctgtgtttttacgcaggctggagcgttgcgccaatcccgtcttcgtctggctgtaatttcagagcgttgcacagagtttgccgactggcatctgttatctcaacgtgtatatccccggtaacttcccctttcacattgatgaagtcaggtgagatttctttcgcactggtttgcaggcaaatcgctccctctccgcgcaggcgtttcactttcagttgcacatgcgttgccgcaccagtgatcagccacagttttccgccattcagattgatgttaccaacaataaaagtgacaccgtcaccttttaccgtactgccgtcgagaatcaacacaccgccctgctgtacagtaatcgttgattgttgcagatctgcgccatagccaataatcattgaagcgccgtccagtaatgcaacactcccggtcagttcaaccggtgcgcgatcttcctctacgacaaaattttcgtccgcgctggtgggtgacaacaggatcactgttccaccttgtattaccgcattttccagcgtaccggcatgcacttcagcccgaccacccacattcacggacaggttttgcgtcttaccggaactgtagagctgaaggccatccgtccccagacgataaatggatccattctcaacaatagtgtcagagtcttcaccaccgagattattcatggtgccaccagcaagcaacgtatcactggctttcccggccagcataaaaacgccgccctgattaatctcacaattgctggcttccccacctggatacaccaacaattcaccaccttcatctaccacgaccgctgaggttgtcccattaaccaacaggccgccctcttgatcgagaatgattttttccgcgcgatgtccttccagtacacgcaggttaccgccattttccagcaacaaaccgcaggcataaccctgatcaacgctgaattcaccttcgggatggcggccattaaccgtagcgagcgtagagagactaattgcgcctccctcggactgaacaatatctgtggcaatggcaccgtcgctgaccgatagcgtgccattgttaccgtactgtgtgcatttggcgatcccaccggttgccactttcaaccagccagcccccgtgaccacggtattttcggctcttccgccagcttcaacaatcaactcgccttcagtaagttgcgtcgcgccaatgacctcgccggtcttaacaatttgcacattcccgtcgctcatcaagtttttcgcatcagatcccatgatttattcctttgctgcatctgtgtgcctttattgctacctaagtgtaaaggctacggaggatttatccacgacagatttgagatggtggcaaacaactctgtttaaactctgatacacgaattattgggttgtatcagatgtaaatgcgatcctgaataaaaatcgcccttgcaaatcaacaaaatatagccaatttgcttaaaagctctgcaaacggtcgaaatagcgcagaaaattacgttttgcctcttgccaccttcccactctgccgctaatattcgtccccgttgtcacctacaacgttgcgttcatagctcagttggttagagcaccaccttgacatggtgggggtcgttggttcgagtccaattgaacgcaccatcctgcgtccgtagctcagttggttagagcaccaccttgacatggtgggggtcggtggttcgagtccactcggacgcaccagattttcttaatctggtcttctcctttttccctctgtttcttctctgtatccaatacgttaaaagatttacactgtcttcgtatgcgttatcagaaggagaatcgctatggcaactttgttacaacttcattttgcttttaatggcccatttggcgacgcaatggctgagcagcttaaaccgcttgctgagtcgattaatcaggaacctggttttctgtggaaggtatggacagaaagtgaaaagaaccacgaagccggtgggatctatctttttactgatgaaaaaagcgcccttgcctatctggaaaaacatactgcccgacttaaaaatctcggcgttgaggaagttgtcgccaaagttttcgatgtcaatgagccactgagtcaaatcaatcaggcaaaactcgcctgacagaatttaatcaagggcggttagcgcccttttcatccctgtctgaaatttctcaaattctaaaaatctcaaccaaacttatctgataacactaaattcgaaagaatgcgtacaggtaagtaacaatgaaaaaaattgctattgtgggtgccgggcctacggggatctacaccttattctcgcttctacagcaacaaactccactttctatttctatcttcgagcaggctgacgaggccggtgtcgggatgccatacagtgatgaggaaaactcaaaaatgatgctggcaaatattgccagtattgaaataccgccgattaattgtacgtatctcgaatggctacaaaagcaagaagccagccatctccagcgttatggcgttaaaaaagaaaccttgcacgatcgtcagtttttaccgcgaattctgctgggcgaatatttccgcgatcaatttttacgattagtagaccaggcacgacagcaaaaatttgcagtggctgtttatgaatcatgccaggttaccgatctgcaaattacaaatgctggcgtcatgctcgctacaaatcaggatttacccagcgagacgtttgatttagcggtgattgccacgggtcacgtctggcctgatgaagaagaagcaaccagaacgtattttcccagtccgtggtcaggcctgatggaagcaaaggtcgatgcgtgtaacgtgggtattatgggaacatccttgagcggactggatgcggcaatggcagtggctattcagcatggttcgttcattgaagatgataaacaacacgtcgtttttaaccgcgataacgcaagtgaaaagctaaatattacgttgatgtcgcgcacgggtattttacccgaagccgatttctattgccctattccctacgagcccttacacatcgtcaccgatcaggcattaaatgctgagattcaaaaaggtgaagagggccttttggatcgggtatttagattgatagtagaggaaatcaagtttgctgatccagactggagccaacgcatagccttagagagcctgaatgtcgattcctttgctcaagcctggtttgccgagcgcaaacaacgcgacccatttgactgggcagaaaaaaatctccaggaagtcgaacgcaataaacgagaaaaacatactgttccctggcgttatgtcattctgcgcctgcatgaagccgtacaggaaattgttcctcatctgaatgaacacgaccataaacggttcagtaaaggccttgccagggttttcatcgataattatgcggcaatcccttcagagtctattcgtcgcctacttgccttacgtgaagcgggaatcattcatattctcgccctcggtgaagactacaaaatggaaattaatgagtcgcgcaccgtcctgaaaacggaagacaacagctactcgtttgacgtttttattgatgcccgcggacagcgtccgcttaaagtgaaagatattcctttccctgggctacgcgagcaattacagaaaacaggggatgaaatccctgatgttggcgaagattatacgttacagcaacccgaagatattcgtggacgcgtagcgttcggcgcgttgccctggttgatgcacgaccagcctttcgttcagggacttacggcatgtgcagaaattggtgaggcgatggctcgggcggtcgtaaagcctgcatcccgtgctcgtcggcgtctttcgtttgattaaaggtaaagctatcagcactcaacaaactgatgctgttcattaagacgatagcggactccggttcgaatattgttttcaccttcaatggcgacggcgaagcgaactctttcgccgtcatgatatgccagtgcggcgcttccccctggcccgagaataattgagtcgaccacgcccgtgctcactaccgttgaattttcaccgctggcaatgatgtgtacattgtcgccgctgttggcaattctggcgtttgcgccaaagctggcgatttgcaccaggtcaccattactggcgacatgacaccgttcacccaatgtacaaacgcgtactcgcattccggtattcgcaatccgactactatctccagcgctgcttatccgcgaagaattaccggttacagcaacccgtgcgcgttcaccggagctgccaatgtgactgttaaagccgacacttccaatccgcacgctataacccatactggcaatttgcgcggcatacccagcggttgcgattcgggcgttatcctcacaacagccgatgcgagcatgatcgtcgctgcgggcaaactgactgcaaaatggtatctctccggggtctgtggccagtttttgcatagaggaaacttcctgatgcgcgaagttttcatccgccagccattttttccacgcatactcaaccagactctccgcccagtccgtatatccttcctcaatcagtgcatgatgaatatcggcataactaccgccgcgtgggaaatggcgcaggaaccagcgatacatcaccgctccgatacgccattctcgcaggtctgctcgtgtaatgatcattcgttagtgccggtgatagccatcgaccatgcttttaaaggtttcgtgtggcgtacgccccgtggtgcaaagataaagatgaccgaagataaaaaagaggcttataaatgccagagcaaaatgcgcctgcaataaccagtatcttacgccaggaaacacatctcccacggcttgcggatagagacacaacagccccgtcaatagtaacaacggcagcaatccatacatgacaccaacataggcgacctgctgtaagggattaaatttagactgtgttgttgccgggaaaggatgttcttccccctgcataatgccaaacaaataaaatcgcgtttgttttgccgctcgttccagccacccctgacgacgaatgcgatagtggtgaccattatccccaacggcattgatcagcacaaagccgagccagcatgccagtaacaaaaatccgcaaacttcatgcaccgcaaccagacttttaaccgcagttgcgcccaccagcgcaaagtgatttatcagcccacttgccagcaacaatacaaagagtaacgcattcgaccagtgccataatctgaccgctttgcagtaaagataaatcttctcaccataatcggtgactgatttcttcacgccacgagcacgaagcaaggcatgcagccccagcaccaaccacatcccaaccagcaatactccggcaatgatcaaccacaccggccaaaattcgggagtgaactgtggcacatagttcgctaactggctctgaaactgttcagcatgttgcgacgggttcatacattttcctttttaatcaaatgttgaccgaaccggcgatacagatgcggtttcccggcaccaggtagctgatattgatagtatttattatcctgcaaccacgcctgaatttctgggctatcttcgcgaccaaagatcaatgcgtgttccggacaggcgctgacgcaaatgggcggaaagccttttgccagtcgggactcagcgcagaaatcacatttatctgccactttagtgacagggttaaggtagcgaacctggtacggacaagcgccaatgcaataactgcagccgatgcactgcgatttttctacccgcacgatcccctgctcatcacgccacgacgcccctgtcgggcatacgtcgatgcacggagcatcttcgcagtgctgacatgactggcgaaaaaagtgatactgcgtttcgttgtcgttatcggtgactggaatgtgtgctatcgataaacggcttccctgagcggggacgtggttagttttacggcatgcgcgggcgcaaatattacagccattgcaccgtgactcgtcatgaatcatggcataccgaacttccttttcttgcctcgtgttcgctaacagagaagacgcagaaccagtaaaaaagattactgttcccatccccagaacaaatttgcgtcgagtgaaggacatctgattatcccctaatgcagtggctgcaactgtccaccctatccatgacatctccctgaaatttcaggggttctgaaactgctctacctcgaaccattcgcataagccataagccttgccataggtcataaatcgctcgctaaacaagtacaacaccgccgtcgatgactccacctgccgtatatcggcatattcaggtgcaacatccatcgcggcgatcgcggcttcaatctgcgcttcctggaagtaatatggcgcttgcatcagcatggcgactttgtaaggacgaggatatgtctggcactcaaaacgaacggcgtgtgcaatggcgcgacaaatgtcctgctccacaacttgcaaagacatcgccgcgtagttttcactcatggcctgcgttgagtaatagtaatcatcctggcttcccgtcatacaagcgatatccgcgtagtctccgttctgcttaatgctttccagcaaaactgacagctcctcttctgcaaccgaatagggtggcgagagaaacacggcgcgcgccaccagctgcccagccacagaatgctggcgaatgaactctgccaggatttcagccggttctggttcggttaccgtatcaacggggtgacgcatcccctgtaaccattgccgcttcgcctcgtcaacttcgctgactttcgctaacggcaattcatcccgatggttcatctcacccattccttacacaggcagtagattgtgtgctgccagatcggcggcaatatcttccagccccagacgctgcaatgtttcgcgggtcggacaaccaagctgtgggtcccagcccatttctttgtagaacatcgtgagcgaagcatgcatatcgtcacgatccattttgtcagtaccttcagtaaagaccgggatctgcggatccttgtcgaatacccaggaacagataagatcgtgttcattacgcatatctttggtttgcatcagttttaccgtgtaggcacgatgcaacgtaaagatacgctctgcagctaaatctaatttttcctgagtcatctcttcgccggtgatcgctttgaagaatttggcttcaagcgccagatcgccccggtaattacggcttttcagcggcgaaacggtcattggccagacccagttacacagggtgacggcgttatgcaaacagacccgcaacagcgaccacttagcatatttaatttttgcgtcattgattggcgtgtagtttttggtttcatcgtaggcatcttcagaaccaaaaagctctttcgccacttcacgttgcagtttcaatggcaagccggaaccaataaagttgatatgggtatgtgtcatgcagtcacggttgaacatacagttaacaatggaaccgacctgcgctgacgcttcattggcatggtgaaccggatagccaaacggcgaccagagtttattttttgcgtagccccagtactcttcacccaaattccagcgttctgcgatggcatatgaaccatcagccaggtgactcagctcacccacacgatgcgccagacggtagtaaaaatctttaatgaaattaacgtcacccgcttccagttgatcccagtgaatttccgcatactcttcagctggcagaacacgcttgaacacccctttgctgtaacaataagtaaagtcgcgatgcagctgcccgtagttacaccataggccgtagtcatcgaacaaattcagaccaaccaggttaccaatcacacgaccatcgtctttatcttcaaaatctttcggcccgttcgggaagatggtggtatggacaaagttggctacacaagtgttaccacctgtgctgggcacgccaaactctttcacccgaggaatattcatttgggtcatacaacggatcgggcaagagtggcagccactcatttttactgtgtatttctctgccgccggacctaagtcaaaaacggatttataggtacgaaagccgaccgtgttctgattgcctggcggaatttcccccgtttcaatcggaccaccttcagccgcgccccaaaacagccctttacgtgctgtccaacgtgacttgggatctgaatactctgcccacgattgcggcgtacttggcacgacatggttgttattcgcaccaataagttcagtcatcatgtaatcgttgagacgcttcatctcctgacgatcggcaatgttgacccctttcgtcccttcaaccgcaatcgctttcaggtttttcgaacccataattgcgccagttcccgcaccgccgctgtggttacggctattcaacatgccagagagaggaacaaggttttccccagcctgaccaatagccgccacacaggtttccggactggtcaatcgacaaatttcttccgtcgttgcgcgcgtcccttttccccataagaaatcggctttttccaggctaactttgtcatctttaatcttcagccataccggtgatttcgccttcccttcgataataatgacgtcgtatccagcgaatttcatttgcgctgcaaaaaagccacccatatgggcatcgacaactaaatttcctttggtaaaagtagaaagtgaggtgatatttacgcgagaactacagggggcaccagatccagttaatgggccggtagcaaagactaatttattcgcttcatcgaaaggtttcgtgcctggcggtacttcgtcatacataattttgtagccgaagcccatgccaccgacaaaacttttaaacttactggaatcttcgagggtaatatttcctgtcgtgagattgactcttaatatattacctgtccaaccgttagccatgattttttcctttgcaagattcacacagtaatatctttccactcgataatttttaacgcccctgttgggcaggcgtttgcgcattcaccgcataacacacatttcgaggattttttactttcggtatttacggtggccatcatccacgggcatgccgtagtacaggcgctacagccaatacagcgtttatgatcgacggtaatacagccttctttctgctgccaggtaatcgcaccaatcgggcagacgttcatgcattgcggctctttgcattgacggcaggtgtccgcggtatagttgagatcgccatacaggccgccgccagagccaaccccgttgtcgccaaagaaataattgcggtggattttgatacgggagaagaatgtccctactgagccatcgttgaagttggtacaagagatttcacagcggtggcaacccgtgcatcgcgctcgctgggtcaccagcacccctttgggtgtatttatcaaccctactgtgccgctatcaatatcttcctgtttgcaacccaaaagtgacagtaacgcaggggcaattgttagaccagcaaggccttttcctgatatacgcaagaattctaatcgcgttaagccaatatctaatagtggacgatcaaccgggttcatttatttcgcatcctcttcgcaaacacagtgctgacaattcagcagcctgatattaagcattcaactaatacgctgctgactctgtccccaacaccagatattttccctaacccgatagtgtatgagaaaagatttaacgccgataaactaatcctttatggttaggagaaaaaataatgtgattattctgagcccttaacattgatcgttatcaattaaaattacaaagcaagaaattataagtgaactgatatttattatcatttgaaataaatttaacttaagcgacaattatttgtgacgttcattgcagaaaataaaaataatattatcgttataaattaaaatacataccgcgattcgtataatttcagcagttgttatttagaatgattaactggaccgcaactgaagcaagaatatcaggatgaagcttaccgcctcatcctgaatggtcattttaccagtgcgttaatgacggtttccatcgcctgcttttccagctcactgcgctgaatgcgtttattggctaatgctgtacgtaatacgcctgcgataacaatatgctttggttcctgccccagatcgcgcatttccagcacaactttaccgacaactctgcacatttctcggtacagttcatcctcttttgtccgatttcccattctttatacctatttatcatgccaactatcagcatatatcaatctaaccaattaaacaaaaatcaaacaaaatcagacaaataacgcgataaattattttaactgtagcaattgagcgatgatgtatttatacaccggatgaactttcacttatcctcacactgacaacttcggcaccagacgttgcgcaaacagtgaagtttttgcgtaaccttttccctggaacgttaaatctttgataacaatttattgtctaacaagttgtatattttttgaaacgctgtttttgttttccttttggattaatttcagcgtataatgcgcgccaattgactcttgaatggtttcagcactttggactgtagaactcaacgattcaaaaacaggcactcacgttgggctgagacacaagcacacattcctctgcacgctttttcgatgtcacctatccttagagcgaggcaccaccacttgcgtaataccggattcgctttccggcagtgcgcccagaaagcaagtttctcccatccttctcaacttaaagactaagactgtcatgaaaaagaccaaaattgtttgcaccatcggaccgaaaaccgaatctgaagagatgttagctaaaatgctggacgctggcatgaacgttatgcgtctgaacttctctcatggtgactatgcagaacacggtcagcgcattcagaatctgcgcaacgtgatgagcaaaactggtaaaaccgccgctatcctgcttgataccaaaggtccggaaatccgcaccatgaaactggaaggcggtaacgacgtttctctgaaagctggtcagacctttactttcaccactgataaatctgttatcggcaacagcgaaatggttgcggtaacgtatgaaggtttcactactgacctgtcagttggcaacaccgtactggttgacgatggtctgatcggtatggaagttaccgccattgaaggtaacaaagttatctgtaaagtgctgaacaacggtgacctgggcgaaaacaaaggtgtgaacctgcctggcgtttccattgctctgccagcactggctgaaaaagacaaacaggacctgatctttggttgcgaacaaggcgtagactttgttgctgcttcctttattcgtaagcgttctgacgttatcgaaatccgtgagcacctgaaagcgcacggcggcgaaaacatccacatcatctccaaaatcgaaaaccaggaaggcctcaacaacttcgacgaaatcctcgaagcctctgacggcatcatggttgcgcgtggcgacctgggtgtagaaatcccggtagaagaagttatcttcgcccagaagatgatgatcgaaaaatgtatccgtgcacgtaaagtcgttatcactgcgacccagatgctggattccatgatcaaaaacccacgcccgactcgcgcagaagccggtgacgttgcaaacgccatcctcgacggtactgatgcagtgatgctgtctggtgaatccgcaaaaggtaaatacccgctggaagcggtttctatcatggcgaccatttgcgaacgtaccgaccgcgtgatgaacagccgtctcgagttcaacaatgacaaccgtaaactgcgcattaccgaagcggtatgccgtggtgccgttgaaactgctgaaaaactggatgctccgctgatcgtggttgctactcagggcggtaaatctgctcgcgcagtacgtaaatacttcccggatgccaccatcctggcactgaccaccaacgaaaaaacggctcatcagttggtactgagcaaaggcgttgtgccgcagctggttaaagagatcacttctactgatgatttctaccgtctgggtaaagaactggctctgcagagcggtctggcacacaaaggtgacgttgtagttatggtttctggtgcactggtaccgagcggcactactaacaccgcatctgttcacgtcctgtaatattgcttttgtgaattaatttgtatatcgaagcgccctgatgggcgctttttttatttaatcgataaccagaagcaataaaaaatcaaatcggatttcactatataatctcactttatctaagatgaatccgatggaagcatcctgttttctctcaatttttttatctaaaacccagcgttcgatgcttctttgagcgaacgatcaaaaataagtgccttcccatcaaaaaaatattctcaacataaaaaactttgtgtaatacttgtaacgctacatggagattaactcaatctagagggtattaataatgaaagctactaaactggtactgggcgcggtaatcctgggttctactctgctggcaggttgctccagcaacgctaaaatcgatcagctgtcttctgacgttcagactctgaacgctaaagttgaccagctgagcaacgacgtgaacgcaatgcgttccgacgttcaggctgctaaagatgacgcagctcgtgctaaccagcgtctggacaacatggctactaaataccgcaagtaatagtacctgtgaagtgaaaaatggcgcacattgtgcgccattttttttgtctgccgtttaccgctactgcgtcgcgcgtaacatattcccttgctctggttcaccattctgcgctgactctactgaaggcgcattgctggctgcgggagttgctccactgctcaccgaaaccggataccctgcccgacgatacaacgctttatcgactaacttctgatctacagccttattgtctttaaattgcgtaaagcctgctggcagtgtgtatggcattgtctgaacgttttgctgttcttctgctgatagtggtcgatgtacttcaacataacgcatcccgttaggttccacggaatatttcaccggttcgttgatcactttcaccggcgttcccgtccgcacgctggagaacaaggctttaatatccggtgcattcatgcgaatacaccctgaactgacgcgcaaaccgacgctgtccggcgcactggtaccatgaatgaggtattcgccattaccatgcgcgaggcgcagtgcgtaacgtcctagcgggttatttggtccggcaggaacgactggcggtaatttaatgccacgctccagcgaacgttgacgaatgcctgccgtaggcgtccaggttgggttagggattttctgcccaacacgcgtttccatcaccggcgtttccagcccctgcaatccaatacctattggataaacctgcacaatattttctcccggcggataataataaaggcgcagctctgcaaggttaacgataatcccctgacgcggtgcatcaggtaataacagttgtgaaggaatagttatcgtcgtaccaggttttggcaccggggcgatagtgttattggcttcaaggatcaacattgccgcagtatcaaaacgtcgggcaatagcctgaaggtttttatccccttcttgcaccgtatacgtttgattttgcccaaccagtcggcttccggttggtggtagcggataatcaaccgcccaggcagcctggatggcgctaaaagcgccgataagcgtgagtgtaagcaaagacgcgcgtttcattgtaaacctcctgtatttgccggagactcacgctgaaacgtcggatggcgcttatgttcacctgaaaccgaaacactcctgtgcaggtcagtgtaaacattgaccatccggcaatgtgagccaaccggatgaaagctgtccctttagtttagctaagtgcagcggctttggcgcgaattgcgcgaatcatcgcttccagaccttgtgaacgagatggggtgagatgttgggtgagcgccattttttcaaaccacggacgcacatcgaaattgacaatatcctgcggcgtcatctgatcgtagagtataaagacgaccgcaataagccctttcacaatcgccgcatcgctgtcgccctgcaattcaataattccctgcgcattctggcgcatgacaatccacacctgactctggcagccctgaatgctattttgtgggcttcggtcttcgtcgcgtaattctggcagacgctggcccagctcaataatgtagagatatttctcttcccagttggcgcagcgtaaaaaattacgcagcaatttttctttatccggcaataaagccatagtgcctccctgttatcccagcaaacggtgaatacgttgcaggccggtcaccagacgatccacttcttcatgggtgttatacatggccagcgacgcccgacacatcgcagggacgttgtaataggccattaatggcatagcgcagtgatgtccggtacgcacagcaatgccgtaattatcgagaaaactgccaacatcataggcgtggtgtttaccgagattaaaagcaataacgccaagcctgttttgtgggccatagagagtgagatccggtacagattccagctgtgatagcgcgtaatgcatcagattctgttcatactcggctatgttattaagccccagcgccgaaacatactccagcgccgcgccaagaccaatgatgcccccggtattgggtgtaccggcttcaaaccgccatggtgctttggtccaggtagtgccttcactcaggctgacggtggcgatcatagaaccgcccccttcccacggcggcatctcctgcaacaaggcttctttcacataaagaatgccaattccggtggggccatacagtttatgcccggagaacacgtaaaagtcgcaatccagcgcctgaacatccaccggatgatgcatcaccgcctgagcaccatccaccagcacttttgcgccatgctggtgcgcaagcgtgatcatttccgccagtggattttctgtgccaagcacgttggagacatgagtaattgccagcaggcgagttttctcatcaaacagcgtaggcagcgtctccagttgcaacgtaccgtcgggattgagcgggatcacacgcagctctgcgccaacgcgtgcgcaaagcatctgccagggaacaatgttagcgtggtgctccatctgactgatgatgatgttatcgcccgcccgcacgttgctgttgccccagctattggcgaccagattgatcccttccgtcgtgccgcggacgaacaccagctcttccgccgaacgggcattaataaacagcgatgcccgtttgcgcacgttctccattttctcggtcgcctgggcgcttaaggtatgaataccacgatgcaccgccgcgtagccgtgacgataaaactcagcctcggcgtcaatcacctggcttggtttctgcgcactggcggcgctgtcgagataagccagcggcaaaccgtttacctcacgcgaaagcaccggaaagtcggcccgcactttgtcgacggaaaaagtcatcttgcacctcctggcagccgttgaccgattcgggccagcacctgctgtttaagcccctcatcacgcagtgcttccgtcagttcggcagcaaaggcgtaaatgatcatctgctgggcatcctgctgattgatcccgcgcgagcgcagatagaacatctgttcatcatcaatacgccccaccgtcgcgccgtggctgcatttcacatcatctgcatagatttccagctgcggtttcgtatccacttccgccagtttgcccatcagcagattattgttggtcatctgaccatccgttttgatggcgtgctgcgcgacgttgatcaaaccgttaaataccgcgcggcctttgtcgctgacgatagttttgtgcaactgtcggctgttacaaaaacctttattgtgttccagccaggtacgggtatcacacacctcgtttttcaccggcatcgccaggctattgatccgcagcgtgctgttttcgccattgagttgcgtactggtgttgtgtcgtaacactgcgccacccagcaggaaactatggctaaatgcggtggcatcgtcagccagcaacaaatcgttatgggcaaagtggtgactgaccgggttttcaaacgccagcttgatatgctgcaagtgggcgttcgctgcgacattgatagtgaaccgtgcgccggtgaagtgacgagcatcattaaggctgacaaaatgttcgatcaccgttgcttcggcaccttccgccagatccagatgatgtcggtaatgggcagtgttgacctcttcacctgccacgccctgggtaatatgcattaacagcaatggctttgccggccgttgaccgcgcttcacggcgatatgcgtcacgctttgtgccaggctttccgtcaaatgcagaaacacttccgcctgaatagcgtcgggtaccccctgacggtcgtcgttaatgctcacttcatacccgctgccttcagtcgcatcgctcagtgctgacacgtaacgtccatcgacaaataccagccgcacagcgtctaacgttaacgctaaggcatctcgctgctgtggggatatctctcccgcaatgctgacaaactggctattggtcagcccttccagcggcgtatatttccagttttcatgtttacgtgtcggcagtccggtacgcagcaattgttgtaaatgctgctgtgcttgcggtgagcgttttgtcccttcagcttcaaacaagtgatgccactgttgcagcgcgttactgctgttcggtaagccagccataaccctgctcctccagttgtttgaccaacgtgaaatcgccggatttcacaattcgtccctgatatagcacatggacgtaatcaggcttgatgtagtcgagaatgcgttggtagtgcgtaacaatgatgaatgagcgcttgccatcacgcagcgagttcacgccatcggcgaccacttttaatgcgtcaatatccagcccggagtccgactcatcaagaatgcataactccggttccagcaccgccatttgcaaaatatcgttgcgctttttctcgccgccggaaaaaccaacgtttaccgaacgggttaataaatcttccggcatcttcaggagagcgattttctcttccatcaaatcctgaaaatcaaagcggtcgagcgtttcctggccgcgatagctgcgcactgcattaagtgccgtttgcaggaaaaactggttactgacgcctggaatctccaccggatactggaaggccataaagatgccttcgcctgcacgatcttccggcgacagtgcaagcaaatctttgcctttgaactcaaccgtgccgcccgtcacttcataatcttcgcgcccggcaagcgttgccgataaggtacttttgcccgaaccgtttggccccataatggcgtgaacttcgccgggacgaacggcgaggcttaatccacgcaggatagctttatcttccacgctgacgtgtaaatctttaatacttaacatgtttattccttatccgacgctgtgttcaagactgatggcgaggagtttttgtgcttcaacggcaaattccagcggcagttctgagaacacgtctttgcagaaaccgttaacaatcatcgagatggcgtcttcttcgctgatcccgcgttgcaggcagtaaaacagttgatcttcaccaatacgtgatgtcgttgcctcgtgctccagttgtgcgctgttattgcgacattcgacatacgggaaggtatgcgccccacaattagcgccaatcagcattgagtcgcactgagtgaaattgcgcgcattggttgccgtcggcatgattttcactaagccgcgataactgttctgactatgtccggcagagatccctttcgagataatggtcgatttggtgtttttaccgatgtggatcatcttggtgccggtatccgcttgctgatgaccgctggtcagcgccactgagtaaaactcaccaatggagttatcgccgcgcaaaatgcagctgggatatttccacgtaatcgcggacccggtttctgattgcgtccatgacattttgctgttttcgccttcgcacaaagcacgcttggtgacgaagttgagaataccgccggtgttgttatcgccagggaaccagttttgtaccgtggaatatttcacctcggcgtttttatggatgatgacttccaccactgccgcgtgtaactgatagctgtcacgcaccggagcggaacagccttcaatgtagctgacgtagctgtcttcgtcggccaccagaatggtgcgctcaaactgcccggttttttccgcgttaatgcgaaaataggtggaaagttccatcgggcagcgcacgcctttaggcacataaataaacgtaccgtcagaggctaccgccgcattaagcgcggcaaagaagttgtcattccccggcaccacggtgccgagatatttacgcaccagttccgggtgatcgtggatcgcctcaccaaaggaacagaaaataattccctgctccgccagtttttcgcgataagtagtggcaaccgaaactgagtcgaaaatggcatccaccgccacctctttgccttcccgcacgggaacgcccaactgctcaaacgccgcctccacctctttacttaaaaaggcgttcgcgccagtttgctgcaccgcgccaggttcagacgcgcaagtgtcgtcacaattaccgcacgatggtgctgagtagtagctgtaatcctgataattcagcttgtcgtagtgcgctttcaaccagtgcggttcttccatctccagccatgcgcgataggcgtttagacgaaacttcagcatccactccggctcattacgcttcgccgaaattgcgcgcaccacctcttcgtttatcccctttgccagctcatcggtggctaactgggtgaagaatccttctttataattcagcgggccgccggtccaggttttgacatcgtcagttgcttcagtattacgagacatagtaccgcctataccccaaagctttcgccacagccacattcattctgggctttagggttgtgaaatttgaatatctgattaagtccttcacgaacgaaatcgacttccgtgccatcaataaacggcatcgcttgcagcgggacaaacagcttcgcgccgtcgtgttcaaacagcagatcgtctttgtccggctcgctaacactgtcgagcacatagccaaagcccgcgcagcccgtttgcttcacgcctaagcgcacgccgaccatacccggctgctttgccaccagctcacggatgtgtatcgccgctgcgggtgtcagcgttaagccttgccaggcgaaatcctgtgggttaaaggttcctgaatgcatgtccatctatttacctcacttcatcgctttcagcgtataacagcatgttagtgataatgattatcagttcaacccagcaaacgcaggggctttaccgtaaaacatgctttttgcctgcttttaataagcatagaccctgatgtgtgggttaacaggcacgctaagaattaggtatctcattgttagataatggttattatctaaggagcattaaggctgtgatgaaaaagaaaaagttgtattgaaaatgactatttaagagataggtaaaaaagtgcagcgttcagaaataagaaaacccttaagtcagtgcgacacaggcttaagggtttctaccccatccggcgcttatctccggcactctcagtggcttagctcttgaaggggcgataagaataatctcataaagctaacccgccgttttaacacaaactgcgattagtattatttttgaacaatatcaggcgggtagataagcagtattaagaaggtcatcgaacctggacggaggttaatccaggtcgatttggcgaacttgcggtattaagtcaggatcaatgcacgcccagacgccaggcaaagtagatttcttcttttaattcagcagaagagagagtaagcaggtcagcaaattcaagttctagttgtttcagacgtttgagatattgggcaggtgaaagattgctctggtcacggcgtaaaaattcaatggccagctgggtgggatcaagttgagtagacatagcatcctcgcttttagacaagacctgcacagtataccaccgtttactgtgcagataatgaccaaaagcaatatgcgtcacacttttctggtgacaacgtcacaaaatggcggtcgtcaatcgtgacgaacagcacaaacgccctttctcatcgaagatttcaatctgccagacctggtgacgcgaaccgagatgcaacggtttgcataccccgcgcacccgcccttctcgtgccgagcggacgtggttagcattgatttccagaccaaccactttttgctcaccttcggtacataaataaccggcaacggaaccgatactttcggccagtaccacggatgctcctccatgcagcaacccgaaaggctgctttgtccgcgagtctactggcattgtcgcttcaagggtgtcatcaccaatatgttcaaagcgaatatccaggaaccccaccatgtttccttcacccatagcattcagtgcttccagggtgattttccgtttccatatcatttaataatctccagtaaagcctgcacaggatggcgtacccccgtgccttcaacccgttttacctggctacggcaggaatatccggtcgccagacagcggttacgcggcagtcgctgcatagcctgatgccaggataactcatagatcccgagcgaatttttatggtttttcgcttcatgtccgtaagtccctgccatgccgcagcaacccacgctgacattttccagtttcgcgccaaaacgggcaaatatcgcggcccattgtgctggcgcacccggcaaggcggtaacttcggtacagtgaccaaagaaataccatgattcaccgctgactgtagccactggctgtgactcaagtgcgcttgccagccattcattcgccagtaagacgttaaactcgccacgttcctcgcccagcgccagtttatattcatcgcgataacaaagtaccagcgccggatcgacgcccaccattggcatacccagcttcgccatacggttgaggaaatccgccgtctttttcgccgtcttcgcaaaacgattaagaaaacctttaatatgctgggctttgccatttggcgaaaatggcagtaacacaggctggaaacctaatttttcgaccagacggacaaaatccgccaccacttgcgcatcgtaatagctggtaaaggggtcctgcaccaccaacactgtgcgcgctttctgctctgcattgagagattcaagctgttccagcgtcatgtttgccgagcgatgccccaccatttgttgttgtagcgaggggaccgacagcagcggcaaatcaaccatgccgatatgtttttccgagagtttgcgcaccagcggctggttaatgaagaagttaaaggttttcggcgcgcgtgccatcagcggcgcgtagctctcgaccgtagcgacgaggtggtcgcgcagcgggcgtaaataacgggtgtgatagagctgcagaaaacgagagcgaaactccggcacatcaattttgatggggcactgggtcgaacacgctttacaggccagacagcccgacatcgcctctttgacttcgtgtgagaagtcatattcgcctttattcgcatgccagctattgcgcgtgcgggcaattaacgtccgcaaactgacgccggattcaggcagttcttgttccagtttgagtggatcaacgccgcgatccgccaacaaacgcagccattcacgcaccagcgttgcgcgccctttcggtgaatgaatccggttctgggtgatcttcatcgacggacacatcggactacgggcatcaaagttgaagcataaaccgttgccgttacactccatcgcaccgcgccactgctggcgtaccgcaatggggatctgccgatcgaatgtaccgcgcttcaccgcgtccactttcatcatcggcgcatcgagaccttctggcgggcaaatcttccctgggttgagtcggttatgcgggtcaaatgccgctttcactttgcgcagttctgcaaaaagttcctcaccgaaaaacgccgggctgtattcagcgcgaaaacctttgccgtgctcgccccacaacaaaccaccgtatttcgcagtcagcgccactacgtcatcagagatttgcttcatcaaaatctcttgttgaggatcgcacatatccagcgctggacggacgtgcaagacacctgcgtcgacgtgaccgaacataccgtagcttaagccgtggctgtcgagcagcgcgcgaaattcagcaatataatcggccagatgttccggcggtacgcaggtatcctcagcaaacggaattggcttagcggcacctttggcattgccaagcagaccaacggcttttttacgcatcgcatagatacgttcaacacccgccagctcgcggcacacctgccagccaatcacacctgcctgttggctggcaatcagctcatcaagccgcacacagagagcattaactcgctcgtcaatcagcgcctcatcatcaccagcaaactccacaatgttcagcccgagcatctctttgtcaggcacatcggtaatcaactcgctgacggaatgccagacaatatcttcccgcgccagattcagcacttttgagtccaccgtctctaccgaaagcgcccgcgcctcaaccataaacggcgcgttacgcagcgcggagtcaaaagagtcatatttgacgttcaccagacggcgcactttaggcaagggcgtaatatccagccgcgcttcggtaataaaggccagcgtcccttctgaacccgtcagaatgcgcgtcaggtcgaactcggtcatctcatcgttaaagacatgacgcagatcgtaaccggtaagaaagcggttaagtttggggaagttgtcgataattaactggcgttgctgacggcaacgttgataaaccgtgttataaattcgcccgattgtggtattggatttacccagcgtttccgccaattcgacgggtaaaggttgcgtatcgagaatatcgccccccaacaacaccgcgcgtacgccaagtacgtgatctgacgttttgccatagaccagcgatccctgaccggatgcatcggtattgatcatcccaccgagcgttgcccggttgctggtcgaaagttccggcgcaaaaaagtagccgaacggtttcaggtactgattgagttgatcttttatcaccccggcctcaacgcgcacccagccctcttcagggttaatttcgatgatgcggttcatatggcgggacatatcaacaataatcccctggttgagcgcctgaccgttagtgccggtgccgccgccgcggggggtaaagatcagcgatgaatagcgttcctgcgcggcaagacgggcgatcagcgccacatctgcggttgaacgcggaaataccaccgcatcggggagaagttggtaaatactgttgtcggtcgacattgtcagacgatcggcataacttgtcgccgtatcgccggtaaaaccttgttgctccagctcttgcaaaaaattaagcaccagttgaacgacgccgggtgcctgggaaatctgtggaatcattatattgaccctttcctgcggtctgtgatgtaggtcgatacactattctttcaggcggctgcaatagcgcactgaaaggtgatgtttatttactctatggatttcgagttgcaggaaggcggcaagcgagtgaactccaggagcttacaatagtaagtgactggggtgaacgaacgtagccgcagcacatgcaacttgaaatacgacgagtaaatcgtttgcgtgttgcctgagttgttgtaccacatttttttctaacacgcccatcagaattaagggcagaatcggcctgttaaaaaccgctgaaattgctcatcattatgcaggtgagtttcgcgtgttcacgtcgcgtcgacgatttgacgcacaaaaaggtgaaaagtagttatggtaaatgttcgtcagcccagggatgtcgcacaaattctgctttcggtgctgtttttagccatcatgattgtggcatgtctgtggattgttcaaccctttattctcggctttgcatgggccggtacggtggttatcgccacctggccggtattgttacgtttgcaaaagatcatgtttggccgccgctctctcgccgttctggtgatgacgctgttattagtgatggtgtttatcatccctattgctttgctggttaacagtatcgtcgacggcagcggcccgctaattaaagccatttccagcggcgacatgacgttacccgatctggcgtggcttaataccattccggtgattggcgcgaagctgtatgcaggctggcacaacttgctggatatggggggacggcgatcatggcgaaagtccgcccttatattggcaccaccaccacctggttcgttgggcaggcggcgcatatcgggcgctttatggtgcattgtgcgctgatgcttctcttcagtgccctgctgtactggcgcggtgaacaggtggcacaaggcattcgccattttgcaacccgtctggcaggcgttcgcggagatgccgccgtactgctggcggcacaggctatccgcgcggtggcgctgggtgtggtggtgacggcgttagtacaggcagtgcttggcggtatcggcctcgccgtatccggcgtaccttatgcaacgttgctaacggtgttaatgatcctctcctgccttgtccagcttggcccgttgccggtactgattccggcgattatctggctctactggactggcgataccacctggggaacggtattgttagtgtggagcggtgtggttggcacgctggataacgtcatccgcccaatgttaattcgcatgggtgccgatttaccgctgatcctgatcctctctggtgttattggtggtttgattgctttcgggatgatcggtctgtttattggtccggttctgttagccgtttcctggcgtctgtttgccgcgtgggtggaagaagtcccgccgccgacggaccaaccggaagaaattctcgaagaacttggcgaaatcgagaaaccgaataagtaatttctcatcaggcggctctgccgcctgattgttaacccccgctaattgatatttgcttactcttccccatattttcctgcttaccgccattcagctggtagtacctgtcgcaaattctttacagtttttaaactaatgagacgaatctgatcgacgcaaaaagtccgtatgcctactattagcttacggttataaatcaacatattgatttataagcatggaaatcccctgagtgaaacaacgaattgctgtgtgtagtctttgcccatctcccacgatgggcttttttttaacatttttccgcttcgctacctcgcccctcactctttccaataatgttgcacaagatactgtgactctcttcaagccgtcagcaggctgataatgttatttatattttattgtttatttcatgcagccattacacgatgaacgcttatgaactccaggcactccgccatatttttgccatgactattgatgaatgcgcgacctggattgcccagaccggtgacagtgaaagctggcgtcaatgggaaaatggcaagtgtgccattcctgatcgtgtagtcgagcaactgttggctatgcgtcagcaaagaaaaaaacatcttcatgccatcatagagaaaataaataaccgcatcggcaacaacaccatgcgttttttccccgacttaaccgcatttcaacgagtctaccctgatggcaattttattgactggaagatctatcaatcggtagccgctgaattatatgcacacgatctggagcggctttgctaatttttccacagaaaggaattgtcgttgttacaacaataatgaatggatactgacacaacatcgctacactttttaaagcacctttgctaagtagaacctatgaaaaatccctattaccctaccgcacttgggttgtattttaattacctggtgcatggtatgggcgtcattttgatgagcctgaatatggcctcgctggagacactttggcagactaatgccgcgggtgtctcgatagttatctcatcgctgggcattggtcgattaagtgtcttgctttttgcaggattattatccgatcgctttggtcgccgcccttttatcatgctcgggatgtgttgctatatggccttcttttttggcatcctgcagaccaataacatcattatcgcttatgtttttggctttctggcgggaatggcaaacagttttctcgatgcaggcacttatcccagtttgatggaagcttttccacgctcacctgggacagccaatattttaattaaagcatttgtttccagcggacaatttttattaccgctaatcattagcctgttagtgtgggctgaactgtggttcggttggtcctttatgattgctgcaggcattatgcttattaacgctctgtttttataccgttgtacgttcccaccccatccgggtcgtcgcttacctgtcataaagaaaaccacccgctctacggaacatcgctgttcaattatcgatttagccagttataccttatatggctatatctcaatggcaacgttttatctggttagccagtggctgtcacagtacggacaatttgttgcaggcatgtcatacactatgtcgatcaaactactcagtatctacaccgtgggttcgctgctttgtgtatttattaccgctccactcattcgaaataccgttcgcccaacaacattactgatgctgtacacctttatctcatttattgctctgtttaccgtctgcctgcatcccacattttatgtggtgataatatttgcttttgtcattggttttacctctgctggaggtgttgtgcaaattggcctgacgttaatggctgaacgtttcccctacgctaaaggtaaagctacagggatctattacagtgcgggcagtattgcgacctttactattccgttgattacggctcatctgtcccaaagaagtattgccgatattatgtggttcgataccgccatcgctgccatcggctttttactggcactgtttatcggcttacgcagccgcaaaaaacgcggcatcactcgctaaaggaaaatgtcgctccgggtgggtaatgcaatattcttttcaggtcatgcaagatcttacggataaataactctttctgcgctaactaaggaaaatcgcgatcaaaaacaaactatgacatgcaatattcctggaaacataaactttatgccatgtacccagggaaaatcatcttcagtatagtaattatgtaaaccgtcgaagaacaatacgtacggtaacgaaattatctttcagcaaggagctgtgaaaatgtctcaaaataaggctttcagcacgccatttatcctggctgttctttgtatttacttcagctacttcctgcacggcattagtgttattacgcttgcccaaaacatgtcatctctggcggaaaagttttccactgacaacgcgggcattgcctacttaatttccggtattggtttggggcgattgatcagtattttattcttcggtgtgatctccgataagtttggtcgtcgggcggtgatattaatggcagtaataatgtatctgctattcttctttggtattcccgcttgcccgaatttaactctcgcctacggtctggcagtgtgcgtaggtatcgctaactcagcgctggatacgggtggctaccccgcgctcatggaatgctttccgaaagcctctggttcggtggtcatactggttaaagcgatggtgtcatttgggcaaatgttctacccaatgctggtgagctatatgttgctcaataatatctggtacggctatgggctgattattccgggtattctgtttgtactgatcacgctgatgctgttgaaaagcaaattccccagccagttggtggacgccagcgtagctaatgaattaccgcaaatgaacagcaaaccgttagtctggctggaaggtgtttcatcggtactgttcggtgtagccgcattctcgaccttttatgtgattgtggtgtggatgcccaaatatgcgatggcttttgctggtatgtcagaagctgaggcattaaaaaccatctcttattacagtatgggctcgttggtctgtgtctttatttttgccgcactactgaaaaaaatggtccggcccatctgggctaatgtatttaactctgcactggcaacaataacagcagccattatctacctgtacccttctccactggtgtgtaatgccggcgcctttgttatcggtttctcagcagctggcggcattttacagctcggtgtttcggtcatgtcagagtttttcccaaaaagcaaagccaaagtcaccagtatttatatgatgatgggtggactggctaactttgttattccgctgattaccggttatctgtcgaacatcggccttcaatatatcattgttctcgattttactttcgcgctgctggccctgattaccgcaattattgtttttatccgctattaccgcgtttttattattcctgagaatgatgtgcggtttggcgagcgtaaatttagcacccggttaaacacaattaagcatagaggttaaaggagttaattatggatgttaccgcaaaatacgaattgattgggctgatggcctatcctatccgccacagtttatcgcctgaaatgcagaataaagccttagaaaaagcgggattgccatttacctatatggcctttgaagtggataacgatagttttcccggagcaattgaaggattaaaagccctcaaaatgcgcggaactggtatatcaatgccgaacaaacaactggcgtgtgaatatgttgatgaattaacgccagcagccaaactggtgggtgccatcaacaccatcgttaatgatgatggctacctgcgcggctataacaccgacggcacgggccatattcgcgccattaaagagagcggttttgatatcaaaggcaaaacaatggtgctgttaggggccggaggtgcctcaacggcgattggcgcgcagggggcaattgaaggtttaaaagaaattaaactctttaaccgtcgggatgagttcttcgataaagccctcgccttcgcgcagcgggttaacgaaaacaccgattgtgtcgtcacggttaccgatctcgccgatcagcaagcctttgctgaagccctggcttccgccgacattttaaccaatggcacaaaagtgggtatgaaaccccttgagaatgaatcattagttaatgatatcagtctgttacatccgggactgctggtcactgaatgcgtgtataacccgcatatgacgaagttattgcagcaggcgcaacaagctggttgcaaaacgattgatggatacggcatgttgttgtggcaaggggctgaacagttcacgttatggactggcaaagatttccctctggaatatgttaaacaggtcatggggttcggtgcctgacaggctgaccgcgtgcagaaagggtaaaaaatgaaaaccgtaactgtaaaagatctcgtcattggtacgggcgcacctaaaatcatcgtctcgctgatggcgaaagatatcgcccgcgtgaaatccgaagctctcgcctatcgtgaagcggactttgatattctggaatggcgtgtggaccactttgccgacctctccaatgtggagtctgtcatggcggcggcaaaaattctccgtgaaaccatgccagaaaaaccgctgctgtttaccttccgcagtgccaaagaaggcggcgagcaggcgatttccaccgaggcttatatcgctctcaatcgtgcagccatcgacagcggcctggttgatatgatcgatctggagttatttaccggcgatgatcaggttaaagaaaccgtcgcctacgcccacgcgcatgatgtgaaagttgtcatgtccaaccatgacttccataaaacgccggaagccgaagaaatcattgcccgtctgcgcaaaatgcagtccttcgacgccgatattcctaagattgcgctgatgccgcaaagtaccaacgatgtgctgacgttgcttgccgcgaccctggagatgcaggaacagtatgccgatcgtccaatcatcacgatgtcaatggcaaaaactggcgtaatttctcgtctggctggtgaagtatttggctcggcggcaacttttggtgcggtaaaaaaagcctctgcgccagggcaaatctcggtaaatgatttgcgcacagtattaactattttacatcaggcataagcaataatatttcggcgggaatatcctccccgccgaactaaaaaaatatattcaaccgtatttaataaaaatatttcgtgagtctctgtgcgctaattatccatctggcgtagggaaaatcacacctgaatcaggaattaacaatgaaacctgtaaaaccacctcgtattaatggacgagtgccggtcctgtcggcacaggaagcggtgaattatattcccgacgaagcaacactttgtgtgttaggcgctggcggcggtattctggaagccaccacgttaattactgctcttgctgataaatataaacagactcaaacgccacgtaatttatcgattattagcccgacagggcttggcgatcgcgccgaccgtggtattagtcctctggcgcaagaaggtctggtgaaatgggcattatgtggtcactggggacaatcgccgcgtatttctgaactcgcagaacaaaataaaattattgcttataactatccacaaggtgtacttacacaaaccttacgcgccgccgcagcccaccagcctggtattattagtgatattggcatcgggacatttgtcgatccacgccagcaaggcggcaaactgaatgaagtcacgaaagaagacctgattaaactggtcgagtttgataacaaagaatatctctattacaaagcgattgcgccagatatcgccttcattcgcgctaccacctgcgacagtgaaggctacgccacttttgaagatgaggtgatgtatctcgacgcattggttattgcccaggcggtgcacaataacggcggtattgtgatgatgcaggtgcagaaaatggttaagaaagccacgctgcatcctaaatctgtccgtattccgggttatctggtggatattgtggtggtcgatccggatcaaagccaactgtatggcggtgcgccggttaaccgttttatttctggtgacttcacccttgatgacagcaccaaacttagcctgcccctaaaccaacgtaaattagttgcgcggcgtgcattattcgaaatgcgtaaaggcgcggtggggaatgtcggcgtcggtattgctgacggtattggcctggtcgcccgggaagaaggttgtgctgatgactttattctgacggtagaaacaggtccgattggcggaattacttcacagggtatcgcctttggcgcgaacgtgaatacccgcgccattctggatatgacgtcccagtttgatttttatcacggtggtggtctggatgtttgttatttgagttttgctgaagtcgaccagcacggtaacgtcggcgtgcataaattcaatggcaaaatcatgggtaccggtggatttattgatatcagtgccacctcgaagaaaattattttctgcggcacgttaactgcgggcagtttaaaaacagaaattgccgatggcaaattgcatatcgtccaggaaggacgggtaaataaatttattcgggaactaccggaaattacttttagcggaaaaatcgcgctcgaacggggactggatgttcgttacatcaccgaacgtgctgtattcacgctgaaagaagacggcctgcatttaatcgaaatcgcccctggcgtcgatttacaaaaagatattctcgacaaaatggacttcaccccagtgatttcgccagaactcaaactgatggacgaaagattatttatcgatgcggcgatgggttttgtcctgcctgaagcggctcattaataggagtataatgatggatttttctttaactgaagaacaagaactgctgctggccagtattcgcgaactgattacgactaactttccggaagagtatttccgcacctgcgatcaaaacgggacatatccgcgtgagtttatgcgggcgctggcggataacggtatttccatgcttggcgtgccggaagaatttggtggtatccctgcggattacgtcacccaaatgctggcgctgatggaagtgtcaaaatgcggtgctccggcattttgatcaccaacggtcaatgtattcacagtatgcgccgtttcggttctgcagagcagctacgtaaaacggcagaaagcaccctggaaacgggtgatcccgcctatgccctggcgttgacggaaccaggtgctggctcagataacaacagtgccactaccacttacacgcgtaaaaacggcaaggtctacatcaacggacaaaaaacctttattaccggtgcgaaagagtacccgtatatgctggtgttggcgcgcgatccgcaaccgaaagatcccaaaaaagccttcaccctgtggtgggtcgactccagtaagcccggcattaagattaacccgctgcataaaatcggctggcatatgctcagcacctgcgaagtctatctcgacaacgtggaggttgaagagagcgacatggtgggcgaagaaggaatgggtttcctcaatgtgatgtacaactttgagatggagcgcctgatcaacgccgcgcgcagcaccggctttgccgaatgcgcctttgaagatgccgcccgctatgccaaccaacgtatcgcttttggtaagcccattggtcataaccagatgatccaggaaaaactggcgctgatggcgattaagatcgacaacatgcgcaacatggtgctgaaagtggcatggcaagccgatcagcatcagtcactgcgcaccagcgcggcgctggcaaaactgtattgcgcacgtaccgcaatggaagtcattgatgatgcgattcaaatcatgggcggtctgggctataccgatgaagcgcgcgtctcccgcttctggcgtgatgtccgttgtgaacgtatcggcggcggtacagacgaaattatgatttacgtagcaggtcggcagatcctgaaagactatcagaacaaataatctgcaggcggcgcagcttcttaacaaactgcgccgccagatttatccaacaagacttaccggttgaggaaattcagataggatttcttgttccgcaaaacagtttttaaattgtctacggtaatcgctgggcgaacaaccgacatggcgcaaaaacagtttggcaaagtgatcgacattttcataacccacacgccaggagatctctgcctgtgataattcagtattagtgagtgaccattttgcttccgtcatacgccgttgaataacatagttaataggggaaatacgatactctttggtaaattcatggcaaatataactgacgctggcacgaaattttttcgataactgttctaaagtgattttttcgcgataattattattcagatagaaaagaatatcttttatcagaacatcttttttaatatacccctgctccgaacgataagcatttttaaaattttcgtagtaaagaatggctaacgtataggcaaatgcatcccataacgaagatgtttggctatttttactttgcggcaaaatcacacttagctcattaaataaggtttttatgacttcttttccctgccccgcggcaattaccggacaagaatgcggttgcagtagctgattttcctcagccccctgaaactgaaagccgtacagcgcacaggtacacgtcgttgccggatcgttaacgtcagaggccaccacatgtagcctgccgcgttctatcaccacaatgtcatccgcatgtgcgacatataacgaagaatcgatggtaaaccttgcaacccctttcttgacgtaaatcaactcggtttcattgtcatgaacgtgatgtccggactcccattttggatcatcgctaaatgcaaaacgtgaaagccgtggcgttttaccggcgacaaacagcgtttcactggcattatcaaaacagcgttgatacatgacaacctccctattccatgagcaagcaaaaacaatatatgccggataaaatacggcgtgtattgcggttatacaaccgcgtttagcgagagctaaacaagattatttacactgaatgcaagattgtacggtcatggaataactatattgccgcaaattgcacttttgttttagcgatcgcattttttttgcaagattgttggcaaggaaaacagcttgctccgtcgaaaaccccgcaccgctatcgcacactattttcaggccatttttaccttccatcggagatggttccgtatgcgactcacaggagaaatcatgaaaataataacctgctttaagctggtgcctgaagaacaggacattgttgtcactccagaatacaccctgaatttcgacaatgccgacgccaaaatcagccagttcgatctcaatgccattgaagctgcaagccagcttgcaacagatgacgatgagatagccgcgctgaccgttggcggctcattgttgcagaactcgaaagtgcgcaaagacgtgctatcccgcgggccgcacagcctgtatttggtgcaggatgcgcaacttgaacatgcactgcctctcgataccgcaaaagcgctggcggcagcagttgaaaagatcggcttcgatttactgatctttggtgaaggttccggcgacctttatgcccagcaggttggcttgctggtcggagaaattctgcaacttccggtgattaatgcagtgagtgctattcagcgtcagggcaatacactggtgattgaacgcacgcttgaagatgatgttgaagttattgaactctctgttccagccgtgctctgcgtcacctccgatattaacgtgccacgcattccttcgatgaaagccattctcggcgcgggtaaaaaaccggtaaatcagtggcaggcaagtgatattgactggagccagagcgcgccacttgctgaactggtcggcattcgcgtaccgccgcaaacagaacgtaagcacatcattatcgataacgattcgccggaggccattgccgagctggcggaacatctgaagaaagccctgaactgaagcctacggagaagaaacgatgagtcaattaaacagcgtctgggtctttagcgataatcctgaacgttatgctgaactgtttggcggcgctcagcaatggggccaacaggtgtatgccattgtacaaaataccgaccaggcgcaggcagttatgccttatggtccaaaatgtatttatgttcttgagcaaaacgacgcgctgcaacgcactgaaaattacgccgaaagcattgctgccctgctgaaagataaacaccccgctatgttgctgttggccgcgacgaaacgtggtaaagctctggcagcacggttaagtgtgcaactgaatgcggcgctggtgaacgatgccacggcggtggatattgtcgatggtcacatttgcgccgaacaccggatgtatggcgggttagcgttcgctcaggaaaagatcaacagcccgctggcgatcattacccttgcacccggtgttcaggaaccgtgcaccagtgatacctctcatcagtgcccgacagaaacggtaccttatgttgctccgcgtcatgaaattctctgtcgcgaacgccgtgcgaaagccgcaagcagcgtggacctgagcaaagcaaaacgtgtggttggcgtcggtcgtggtctggcggcgcaggatgacctgaaaatggtccacgaactggcggcggtgctgaatgctgaagtcggctgttcacgtccaattgccgaaggcgagaactggatggagcgtgaacgttatatcggtgtctccggcgtgttgctgaaatccgatctctacctgacgctggggatctccgggcagatccagcatatggttggcggcaacggcgcaaaagtgattgtcgccatcaataaagataaaaatgcgccaatcttcaattatgccgactacggtctggtgggcgatatctacaaagtcgtccctgccctgattagccagttgagccgctaattcccctttcaaccacatctcccgctgtaaacgcagcgggaagggagcataacgcatgtcggaagacaaatttgatgccattgtggtcggtgcgggcgttgctggtagcgttgccgcactggtcatggcgcgagccgggctggatgtcctggtgatagaacgcggcgacagtgccggatgtaaaaacatgaccggcgggcgtctttatgcccacacacttgaagcaatcattccaggctttgcagtatcagcgccggtagaacgcaaggtcacacgcgagaaaatctccttcttaaccgaagaaagcgccgttaccctcgattttcaccgcgagcaaccagatgttccgcaacacgcatcttataccgtattgcgtaatcgtctggacccgtggttgatggaacaagccgagcaggcgggcgcgcagtttatcccaggcgttcgcgtcgatgcgctggttcgtgaaggaaacaaggtcactggcgtgcaggctggggatgatattctcgaagcgaatgtggtgattctggctgatggcgttaactcgatgcttggccgctcgctgggaatggttcccgcttccgatccgcatcattacgctgttggtgttaaagaggttattggcctcacaccagaacagatcaacgatcgctttaatattacgggcgaggaaggtgccgcctggctgtttgccggttccccttctgacggcctgatgggcgggggatttctctataccaacaaggattccatatccttggggctggtttgtggattgggtgatatcgcccatgcgcaaaaaagcgtgccgcaaatgctggaagattttaaacaacaccccgccattcgcccactaattagcggcggcaaactgcttgaatattccgcgcatatggtgccagaaggcggtctggcaatggtgccgcagatggttaacgatggcgtgatgatcgttggtgacgccgcaggcttctgcctgaatttgggttttacagttcgtggcatggatttagccattgcatcggctcaggctgccgccacaacggtgatcgccgccaaagaacgcgaggatttctccgccagcagtctggcgcaatacaaacgtgagctggaacaaagctgcgtcatgcgcgatatgcagcatttccgcaagatcccggcgctgatagaaaacccgcgcctgtttagccaatacccacgaatggtcgccgacatcatgaacgagatgttcaccattgacggcaaaccaaaccagccggtacgcaaaatgatcatgggacatgcgaagaaaattgggctgatcaacttgctgaaagatggcattaagggagcaaccgcgctatgagccagaacgctacggttaacgtcgacatcaaattaggcgtcaataaattccatgttgatgagggccacccgcatatcattctggcggcaaatcccgatatcaatgaattccgtaaattaatgaaagcctgccctgccggactttataagcaggatgacgccggcaacattcattttgattctgccggttgtctggagtgcggcacctgtcgggtgctgtgcggtaacactattctcgaacagtggcaatatcccgcaggcaccttcggtattgattttcgctacggctaatcatgcatcccacaggcccgcatctcgggcctgatgttctgtttcgagagtccaacatgaaagtgacattaacgttcaacgaacaacgtcgtgcggcgtatcgtcagcaagggctatggggcgatgcttcgctggccgattactggcagcagaccgctcgtgcgatgccagacaaaattgccgtggtcgataatcatggagcatcgtacacctatagcgcgctcgatcacgccgcgagctgtctggcaaactggatgttagcgaagggtattgaatcaggcgatcgcatcgcatttcaactgcctggctggtgtgaatttactgttatctatcttgcatgcctgaaaatcggtgcggtttccgtaccgctgttgccttcctggcgggaagcagaactggtatgggtgctcaataagtgtcaggcaaaaatgttctttgcaccgacgttgtttaaacaaacgcgtccggtagatttaatcctgccgctgcaaaatcagcttccacaactacaacaaattgtcggcgtggacaaactggctcccgccacctcttccctctcattaagtcagattatcgccgacaataccccactgaccacggcgataacgacccacggcgatgaattagctgcggtgctgtttacctccggaaccgagggtctgccaaagggcgtgatgctaacgcataacaatattctcgccagtgagcgggcttattgcgcgcggctgaatctgacctggcaggatgtctttatgatgcctgcgccactcggccacgcaacgggctttctgcatggcgtaacagcaccatttttgattggtgctcgcagcgtgttgttagatattttcactcctgatgcgtgtctcgcgctgcttgagcagcagcgttgcacctgtatgctcggcgcaacgccgtttgtctatgatcttttgaatttactagagaaacaacccgcagacctttcagcgctgcgcttctttctttgcggcggtaccacaatccccaaaaaagtggcgcgtgaatgccagcagcgcggcattaaattattaagtgtttatggttccacagaaagttcgccgcatgcggtggtgaatctcgatgatcctttgtcgcgctttatgcacaccgatggttacgctgccgcaggtgtagagattaaagtggtcgatgacgcacgcaagaccttaccgccaggttgcgaaggtgaagaagcctcgcgtggccccaatgtgtttatgggatattttgatgaacctgaattaaccgcccgtgcgctggatgaagaaggctggtattacagcggcgatctctgccgtatggatgaggctggctatataaaaattaccggacgcaaaaaagatattattgtccgcggcggcgaaaatattagcagccgtgaagtggaagatattttattgcagcatcctaaaattcacgatgcctgtgtggttgcaatgcccgatgaacgtttaggtgaacgatcatgcgcttatgtcgtgctgaaagcgccgcatcattcattatcgctggaagaggtggtggctttttttagccgtaaacgggtcgcaaaatataaatatcctgaacatatcgtggtaatcgaaaaactaccgcgcactgcctcaggtaaaatacaaaagtttttgttaagaaaagatattatgcggcgattaacgcaggatgtctgtgaagagattgaataagtttcatcttcggggatcacataaacccggcgactgaacgccgccggggatttattttatttcttcagttcagccaggcttaaccaggtttgcaccacggtgtccgggttcagagacaggctatcgatcccctcttccatcaaccatgcggcaaagtcttcatggtcggacggaccctgaccgcaaatcccgacatatttgccctgtttcttcgcggcacggatagccatcgacagcaatgctttcaccgcatcgttgcgctcatcgaacagttcagacaccactccggagtcacggtccagaccgagcgccagctgtgtcatgtcgtttgagccaattgagaagccgtcgaaatattcgaggaactgctctgccagcaaggcgttggacgggatttcacacatcatgatgattttcagcccgttctcgccacgtttcagcccctgacgcgccagttcttcaaccaccgctttcgcctgatctacggtacgcacgaacgggatcatgatctcaacgttggtcagccccatgtcattgcgcacacgtttcactgcttcacactccagcgcgaaacagtcgcggaagctgtcggaaacatagcggcccgcgccacggaagccgagcatcgggttctcttcatctggctcgtaacgctcaccaccgaccaggttggcatattcgttcgatttaaaatcagagagacggacaatgacgcgcttcggataaaacgcggcacccagcgtcgcgatcccttcagtcagacgaccaacgtaaaattcacgcggagaatcaaaacctttcatcatctcgcggatttcgttttgcaactgcggttcctgatcgtcaaactcaagcagtgcgcgtgggtggacgccaatcatacggttgatgataaattccagacgcgcaaggcccacgccttcgttcggcagacaggcgaagtcgaaagcacggtccgggttaccgacgttcatcatcactttcaacggcagatccggcatcgtttctacgctggagcttttcacgctaaattccagcaactccgcatagacgtaaccggtatcaccttcggcacaagaaacagtgacgttctcaccgtctttcatccgttctgttgcatctccacagcccactaccgccggaatgcccagttcacgagcgatgatcgccgcgtgacaggtacgaccgccacggttggtgacgatggcagatgctttcttcatgatcggttcccagtccgggtcggtcatatcagtgaccagcacgtcaccaggttcgatgcggttcatttcgctgatgtcatggatgactttcaccggacccgcaccgatgcgatgaccgatagcacggccttcggcgataatcttaccctgtgaatgcagcgtataacgctccatgacctgaccgcgtgagcgcacggtttccggacgcgcctgcacaatgaacagtttgccggtgtggccatctttcgcccactcaatatccattgggcgaccgtagtgtttctcaatttgtacggcctgttttgccagttcctgcacttcttcgttggtcagcgagaagatgtcacgctgttcctgcggtacgtcttcgattttaacctgcttgccgtgctcctgggtcggcgcataaaccatgcggatttttttcgatcccatggtgcggcgcacgatagccgggcgattcgccgccagtgtcggtttatggacgtaaaactcatccgggttaaccgcaccctgcacgaccatttccccaaggccccatgcggaagtgataaacaccacctggtcaaagccggattcggtatcaatggagaacatcacgccagaagatgcgaggtcggagcgcaccatccgctgaacaccggcggagagcgccacgccacggtgatcgtaaccctggtgcacacgataagagatggcgcgatcgttaaacagagaagcaaatacatgtttcactgccacgagaacggcgtcaaaaccctgaacgttgaggaaggtttcctgctgaccggcaaaagaagcgtccggcatatcttctgcagtagcggaggaacgcaccgcaaacgaggcgttttcgtcatcggcggaaagctgtgcataggcttcgcggatggcgttttccagctcaggctggaagggagtgtcgataatccactggcggatttgcgcgcccgctttcgcaagctgagtaacatcgtcaatatccgttttatccagcagttcataaatgcgctggtttacgccgctttggtccagaaactggttaaacgcgtcggcggttgtggcgaaaccattcggaacggaaacacccattccggaaaggttagtaatcatttcacccagggaggcatttttgcccccaaccctgtctacatcattcatgccgagttggttataccaaagcaccagcggtgacgagccattgttggacatcgaacaatccttttgtgataaatgaacggtttgagaaacacatttctgcgcatttatctttgcatatttaaccggatgaaaaaacggtgaatcgttcaagcaaatatatttttttactttttaagactgatcccagcgttgcgcaaatctgctctcttcgacaatttccacataaaccatcggtataaacgaaaccataaaaatgaaatactgttttcataaaaaataaaattgaaggttcattttataaaccagacattacgtcctacgcttctgtgcgtttttaatttatgctttcatagaattatgtctgcatcacgggaagaacaaaatggataatgctgttgatcgccacgttttttatatttctgatggtacggcaataactgcggaggtattaggacacgcagtaatgtcacaatttcccgtcactatcagcagcattacgctgccgtttgtcgaaaatgagagccgtgcacgggcagtgaaggatcagattgacgccatttatcaccagacaggtgtgcgcccgctggtcttctactccatcgtgttgccggagattcgcgccatcatcttgcaaagtgaaggcttttgccaggatatcgttcaggcgctggttgcccgctacaacaagagatgaaactggatccaacgccgattgctcatcgtacccatggccttaaccctaataatctcaataaatatgatgcgcgcattgcggcgattgattacacccttgcccacgatgacggtatttcgttgcgcaatctggaccaggctcaggtgatcctgctcggcgtttctcgctgtggtaaaacccccaccagtctgtatctggcaatgcaatttggtatccgcgcggcaaactacccctttattgccgacgatatggataatctggtgctacccgcgtcgctcaaaccgcttcagcataaattgttcggcctgactatcgacccggaacgtctggcggcgattcgcgaggaacgtcgggagaacagccgctatgcctcgcttcgtcagtgcaggatggaagtcgcggaagtagaagcgttgtaccgtaaaaatcagatcccgtggattaacagtaccaattattcggtagaagagattgccaccaagatcctcgatatcatggggcttagccgccgaatgtactagagaactagtgcattagcttatttttttgttatcatgctaaccacccggcgaggtgtgacacacctcgcacttgaaatcagctgcgattggtttatcgtgatgcgcatcacttcccggtagtcctgccgtagaagcaacaaatttctgagacttgtaatgaacagaactgacgaactccgtactgcgcgtattgagagcctggtaacgcccgccgaactcgcgctacggtatcccgtaacgcctggcgtcgccacccatgtcaccgactcccgccgcagaaatgaaaaaatactgaatggtgaagataagcgactgttggttattattggcccctgctcgatccacgatctcaccgctgcaatggagtacgccacccgtctgcagtcgctgcgcaaccagtaccagtcacggctggaaatcgtaatgcgcacctattttgaaaaaccacgaactgttgtcggctggaaagggctaatctccgatccggatttaaacggcagctatcgggtaaatcacggtctggagctggcgcgcaaattacttttacaggtaaatgagctgggtgtccctaccgcgactgagttcctcgatatggtgaccggtcagtttattgctgatttaatcagttggggcgcgattggcgcacgtactaccgaaagtcagatccaccgtgaaatggcttcggcactctcctgtccggtaggttttaaaaatggtaccgatggcaacacgcggattgccgtggatgctatccgcgcagcccgcgccagccatatgtttctctcgccagacaaaaatggtcagatgaccatctatcagaccagcggcaacccgtatggccacattattatgcgtggcggcaaaaaaccgaattatcatgccgatgatatcgccgcagcctgcgatacgctgcacgagtttgatttacctgaacatctggtggtggatttcagccacggtaactgccagaagcagcaccgtcgccagttagaagtttgtgaggatatttgtcagcaaatccgcaatggctctacggcgattgctggaattatggcggaaagtttcctgcgcgaaggaacgcaaaaaatcgtcggcggtcagccgctcacttacggtcaatccattaccgacccgtgtctgggctgggaagataccgaacgcctggtcgaaaaactcgcctctgcggtagatacccgcttctgaatgcgtgcccattcctgatgggatgggcatttctgcgcaacttgttgtcttttcaacacattactgcttgctctggcctgccataatattgataataagaatcattgttatatcaattattattaatttttatgcgttatacggatagcagaaaactcacgcctgaaacggatgccaatcacaagaccgcttccccgcagcccatccggcgaattaccagccagacactgttaggtccggatggcaaactgattatcgatcatgacgggcaagaatatctgctccgtaaaactcaggctggcaagctgctgttgaccaagtagcctttaactcgagcagctgacttccagccgtttaccccagtcaggtggacgactgacatagtcatcagctctgtcgctgaaaggatttcgcaacgcctcatgcaggcggtgcaattccgtcatatcacccttttctgccgcttcaatcgcccgttgcgccaaccagttgcgcaacaccagagctgggttaacgctttgcatcagttgctgacgctcaatatcgctaacctcgtcttgttgcaaacgcctccgataacgggcaaaccagtcatcaaatgccgcacgatcaataaactcatcacgtagcggtgacgccgcgctgtgctgctcggtcagactcagcatgcggaatgtgcgggtataatcgctgcgctctcgcgccatcagactgaataattcattcagtagcgcgttatcctctttttgctccgtcatgaagcccagtttctgccgcatccgttgtccataatgcgtcaacaaaacctgctgatagctgtccagggcctcattcagggcatctacggcaacaaatggtgacaatgtctgcgccagacgctgtaaattccacaacgcgacggcaggttgattatcaaagctgtaacgcccttgatgatccgagtgattacaaataaaaccgggttcgtaatcatcaagaaaaccaaacggcccgtaatcaagcgtcagccccagcagcgacatgttgtcggtattcatcaccccatgagcaaagccgaccgtctgccattgggcaattaacgatgcggtacgtgcgacaacatcgttaaaccagagacggtatttgtcctcatcatcttcaagatgtgaccagtaatgacgaatggcaaagtcagctaactgacgaaccttttccggctcgcggcgatagtaaaaatgttcgaaatgaccaaagcgcagatgacttggtgccacacgcatcagcatcgcacctggctctaccgtttcccgatacactggcgaatcgctggtgacgatacttaacgcgcgggtcgtcggaatgcccagataatgcatcgcctcactggcgagactttctcgtatcgtcgaacgtaaaaccgcccgtccatcacccattcgcgaataaggcgtcaggccagcacctttcagatgccagtccattgtagtgccatcagcaagcagttgttcgccgagtaaaatacctcgcccatcacccagttggcccgcccagacgccgaactgatgaccactgtaaacctgcgccagtggtgacataccaggcagtagggtttcgccgccccagacacctgcgccatttttaaacagcgacgatggaatactcagcgtgttagcgagttcggtattatgccaaatcagccgggcattatttaaaggcgtaggggaaagtgctgtataggttgctggcaattcatcgcgccagcgggtaataaaagacagggtcatagatcctcctgtttaatagtgtagacggttactctcgtcttaaacaccagcaaacaggagggttatcgctgaaccaacgtcgttatctgatttataggaacggcaggccacaggcatccctggagagcatggaaatcgaagggggtaatctgtgccaatatttctgtcgtatcaatgccccccgcgatgatgcaattgcaacaaggggaaatttgcgcctggatcgcacgaataaacggttcgaaggagcgatgcgtgatttgttgctgaataaaacttttatccagcatgacgcgggtgaaaagaccatcaaaaaccgctttcattgtgctattacctgctcccaaattgcctaacacaaggggatacatttgcgataaggataaaagatcgcgattatcttttccttcattgagatgcgggtaattctcattaatcaacagttcaataaacggatattttaatagttcgcctgcgtaattatccctctctaataataatgtagccacttgtggcgttaaattaagccaggcaaagagtttatgttgaataaaaaaatgttggcatgattttagtaattccaactgctctgaaaataattgccaatgttgctcctcggtaagttgcgctataacccgactcgtcgggatacgaaccgtaccatcttcactggagaaatgggtaattaactcaacgccgacaaggtcttgctggttatctcttatcggcaggaaatagcaatcagaatgataaagattctccaaaaaaatcttcatggtaaccgtccctctcgaaggatgtttttcagtatccggctaaaagggatgaggccataagacataacaattacataaggagtaactttcatttgttccatgttaaccactttttcaggggtccttttttagattatcctgattataaacgaataatccatttacggaatttttgtctgcaaaatactactgtattcaggagtaaatggacggcgatgtatcatcgccgtccatttttcgacatactaaattcgtctcgcctgccagaaatttttctgccaatagacattatcaagtgaggaacgcatcactcccttgctggtagaggcgtggataaattggttgttggtatcgtaaatacctacatgcaaaccattttgtccggaacccgttttgaaaaagaccaggtcacctggcagcaactcgtctttatcaatttgcgtgccaatagaggcttgttgtttggtttcacggggcagctgcaaatcgaaacgatcgcgcatcgtcacaaccacaaatcccgaacagtccacaccgcgccgcgtcatgccaccataacgatacggcgtgccatgccagctttgtagctggtcgttcaaaccggcaataacggtaatcgaatcagaaagtctggcatttggcggcggtgctttatggtggctacacccggccagaagcagtgctgtgatcaaaataaggcagaaacgcattccgtacggttcctctgttttttattcttgcattaatttagcgtcgtaattacccgattttcaagatactaatgaaatcagatggtcgaaatcagcattctgtgaccttcgatatccagacggcgaaaattcatcccataggcctgcgccagatttggcggcgtgagcacctcttccctgcgtccactggccagcatttttccaccttttagcaaccacgcccgatgcgcatgacgcaatgtgtggttgagatcgtgactgctcatcacaatcgccagtccttgctgacacagcgcgctcagaattttgtctaacgcactttgttgcgcaacatcaagactgttcatcggctcatcaagaagcagcaattggcctgcgggattggcttgtggtgtgatttgcaacaccaccgcagcaagacgtacgcgttgccattcaccgccggaaagttgattggtgctacgtccgagtttgtcatcaagagccagcgcccctgcgacatcattcagtagttcggtacgcgttttatcgtgctgatgcagtgtcaggtagtgccagaccggcattgcaaacggcggcgtctgctgttgtgaaagataggcgcgatgcagcgcgagttttgttgcggaccatgcttccagtggttgccccgcgaactgaatgcttcccttaccgctggtcattccggccattcgcgccagtaaggtactcttacccgcgccattcggccccaccaggtgcaggatctccccagcccgaacctcgccagaaagcggccccaggcgggtagattccgcaacatcttgtaactgcatcacaatagacattattttgccaacgccagtttaatgctttccatcacaatgggatcttccggcgtcatatccggggaaaaacgctggatgacttttccgtccctgccaaccaggaatttttcaaaattccataaaatatcatccgggtacagcggtgcacggcctttgctgaccatacgggcatagaatccgctctcttccggcgcgactgcggtcggcgctgcggcaatcaatttttgatacagcggatggcgtccttcgccattaacttcaatcttactgaacatcgggaacgtcaccccccatgtggtggtacagtaagttttaatctcttcatcgctgcccggttcttgttccagaaactggttgcacgggaatcccagcaccacaaaacctcgatcggcccaggctttctgaatattctccaactgctcatattgcggcgttaagccacactttgaggcgacattgacaatcaacagcacattaccggcgtacttctccagcgtggtcacttcaccgtcgatatctttcactacggtcgtcagaatggaatcttgcatcgtttctcctgggtgtggtcagtaaaaatcttagcttttaatcatagaccgtctttttgcggctaacgtcttgcttttaacaataaccagataaacaccggcgcacccaacgttgcggtgaccacgccaataggcagctctgcggcagctaatgccaggcgcgctacaatatcggccagcagcaatgcgctcgcccctgccagcgcgcagccgggaagtaatacgcgatgatcggttaaaccacacagccggagaatatgtgggatcaccagaccaataaagccgatagcacccgccagcgccacactgacgccaaccatccagccggtcgctgccaccagcacattgcgccagaaccacaggggtaaacccagttgccgcgccgagatctcgccaagtgctaacatattcatcggcctggactgacaacagatccacaacaacacggggatcaatgccagcatcagccagctttgccgccagtctacgccgccaaaaccgcccatcatccagtacatcagctgacgtaaatcaacagaggtggaaaagtagatagcccacgtcattagtgcgctacagataatccctaatgcaacgccagccagcaataaccgactggtcgaaagatgacgacgggcgaaacgtaagagtattaaagtgatgataagcgcgccagcaatcgcacacagccctagcgcccagttggggagttgcccttgcccaagcaataccgcggcgataagccctacgcctgcgccgttagagacgccaagtagtccaggttctgccagaggattttcaaacaacgcctgcattactgcgccggatatagccagcgccgcaccaaccagcaatacagccagcgtacgtggcaggcgaatctgccagacgaacagttcgccacgaggagaaaaccagtcacctggcgagatccattgttcaccggcgcaaaggcttaagagaagcgccagcagcatcaaaactgacaggcataataaccagcgaatattttgtcgctgttgttggcgggcaagtgtcagcatggtatccgttctgctgaagtgtcatggcgttgattttacggtgactcttcgacagtgaaaagaaaaaaggccgcagagcggcctttttagttagatcagattactcgtctttgggcgaagcgttttcgacccggctttttaacttctgcccgggtctgaaggtcaccacgcgccgtgctgtaatgggaatatcctcgcccgttttcgggttacgtcccgggcgttgattcttatcacgcagatcgaagttaccaaaaccagagagtttcacctgttcgccgttttccagagcgcgacggatctcttcgaaaaacagttcaaccagttctttggcatcccgcttgctaagcccaagcttatcaaacagatattctgacatttcagcttttgtaagcgccataggttcaatccctcaatgatgcctggaatcgctcttttaatgcctctacacatttggcgacggtagcggcaatctcctcttcttcgagtgtacggctggtatcttgcaggatcaggcttatggcgaggctcttatacccctccgcaacacccttaccgcggtacacgtcaaataagtttacgccaactacctgatttacgccaactttcttacattcggataaaatatccgctgcgggaacgttttctgcgaccaccaccgcgatgtcacgacggttcgccgggaagcgagaaatctcgcgcgcctgaggcaccacgcggtctgcgagcttgttccactccagttcgaacaccagagtgcgaccgttaagatccagtttacgttccagttcaggatgaacaaccccaacaaaaccaatacgttcacctttcagataaatcgctgcggattgccccggatgcagtgccggattcgcttctgcacggaactcaacctcattcagtttaccggtcaggtcgagaacggattcaagatcgcctttcaaatcatagaaatcaacggtctcttttgccaggttccagtgctcttcgtaacggttaccgcaaatcacaccggctaacatcagatcctgacgaatgcccaacggtgcctgagtatctggtacgaaacgcagaccgctttcgaaaatgcgcacacggttctgctgacggttctggttgtacaccacggttgccagcaggccggtccacagagaaagacgcattgctgacatttcaacagagatcgggcttggcagcagtaaggcttcaacgcctggatggatcatctgctgcactttcggatcaacgaagctgtaggtgatcacttcctgatagcctttgtcgttgagcagcgttttcacgcgcttgagcgacaggtcagcttcacggtgagtacccataatcaggcttgcctgtaccggctcatccgggatgttgttgtagccgtaaacacgcgcgacttcttcgaccagatcttcttcaatctccatatcgaaacgccagctcggcgcaactgcctgccactcgtctttgccttcggtcacttcgcagccgagacgacgcagaatgtcagttacctgctcatccgcaatatgatggccgatcaggcgatccagtttgctacgacgtaaagtgatggttgcacgcttcggcagcgttgcttcgttggtgatatcaattaccggaccagcctcaccaccgcagatgtcgatcagcagacgggtcgcacgttccatcgctttgtgctgcagtgccggatcaacgccacgctcataacggtgagacgcatcagtatgcaggccatgacgacgagcacgaccggtgatagacagcgggctgaagaaagcgcattccagcaagacgttttgcgtttcgtcattcacgccagagtgttcgccaccaaagatgccgcccatcgccagcgccttgttgtggtcggcgatgaccagagtgtcagcattcagcttcgcttcagtgccatcaagcagtaccaacgtttcgccctctttcgccatccgcaccacaatgccgccttcaatgcgatctttatcgaaagcgtgcatcggctggcccagttcgagcagtacatagttggtgacgtcaacaactgcatcgatagaacggatcccgcaacgacgcagtttttctttcatccacagcggagttggcgctttaacgttaatgccttttaccacacggccaagataacgcgggcaggcttccggcgcttcgactgtaatcggcagcgtgtcgtcgatggtcgcaccaaccggaacgatttccggttcaaccagcggcagctgattcagcacggcaacgtcacgcgcaacaccaatgatacctaaacagtcggcacggtttggcgtcacgctgatttcgatggtgttgtcatcaagtttcaggtattcacggatgtcggtgccaatcggcgcatccgcaggcagctcgataatgccgctatgatcgtcagaaattcccagctcagaaaaggagcacagcatcccttctgacggttcaccacgcagtttcgccgctttaattttgaaatcacccggcagaacagcaccaatggtagctaccgccacacgcaggccctgacggcagtttggcgcaccgcagacgatgtccagcaggcgatcgccgccaacattcacttttgtcacacgcagtttgtcagcgttcggatgctgcgcacactcaaccacttcaccaacgaccacgccgtggaagctaccggcaaccggttctacaccgtcaacttccaggcccgccatagtgatttgattcgccagcgcatcgctatcaatcgccgggttcacccattcgcgtaaccacagttcactgaatttcataatctattcctgccttatttaaactgtttgaggaaacgcagatcgttttcgaagaatgaacgcaggtcggtgacgccgtaacgcaacatagtcagacgctccatccccatcccgaaggcgaaaccagagtaaacttccggtcgatgccaacgttacgcagcacgttcggatgcaccatcccgcagcccagcacttccagccatttaccgtttttacccatgacatccacttctgcagaaggttcggtaaacgggaagtaggaaggacggaagcgaatctgcaaatcttcctcaaagaagttacgcaggaagtcgtgcagcgtgcctttcaggttggtaaagctgatgttggtatcaacaatcagaccttccatctgatggaacatcggcgtgtgagtctggtcgtagtcgttacgataaacacggccaggcgcgatgatacgaatcggtggctgctgggctttcatggtgcggatctgtacgccagaggtctgggtacgcagcaggcgggtagcgtcaaaccagaaagtgtcgtggtcagcgcgcgccgggtggtgaccaggaatgttcagagcatcgaagttatgataatcgtcttcgatttccggcccggttgccacggtaaagccaagctcaccgaagaaactttcgatacggtcgatggtacgggtaaccggatgcagaccgccgttttcaatgcgacgacctggcagagagacatcaatcgtttccgccgccagacgcgcattcagtgcagcgctttccagttccgctttacgcgcattcagcgcctgctgaacctgctctttcgcttcgttgataaccgcaccagctgccggacgctcttctggcggcagctcacgcagggtcgtcatctgaagggttaagtgcccttttttacccaaatattcgacgcgcacattatctaacgcggcaacatctgacgcctggctaatggccgccttcgcactggcaaccagttctgcgagatgtgacatggttttcctcattgtgtcagtggtgacactggttcgttggacttagagcctatcccatcaggctattttacttgccattttggtcccgggcagtgctcgaaatcctcacgtacttaattacgctccggtttctccgcgctggccgtgtccagactggctgcgacaattacgcctgatagactggctttttatttttcaaaacgcgcatacaaaaaaagcctccactgggaggctttcaggcgctgttttccgtttctcttctcacgcgctagcctcctggattcaggtgctaaagtaaaaaaagaagcggaaaatagcagcattcattgcttgcgttaccttttggtactcttcaaaagacctttattgaaaaggctacggcgataaaagtcaatgttttgatggcgttgaaacgaaaagagggagactagctccctctttcaactggcttatgccagagctgctttcgctttttcaaccagagcggtgaacgctactttgtcgaatactgcgatatcagccaggatcttacggtcgatttcaacagaggcttttttcaggccattgatgaatttgctgtaagaaataccgttctgacgtgctgctgcgttgatacgcgcaatccacagttgacggaactgacgcttacgttgacgacggtcacggtaagcatactgaccagctttgataacagcctggaaggcaacgcggtatacgcgagaacgcgcaccgtagtagcctttagcttgtttcaaaattttcttgtgacgtgcgcgtgcaataacaccacgttttacgcgagccatatgtgctctcctgtatctatattctaattaaaaagttaaaaacgttaacggcttatgcgtacggcaggcacgcgattaccaggcccagatcgcctttggaaaccatggctttcggacgcaggtgacgtttacgtttggtcgcttttttggtcagaatgtgacgcaggttagcgtgcttgtgcttaaaaccacctttaccggtttttttgaagcgcttagcagcaccgcgtacggtcttaatttttggcattttaataacttccacttcgcattgttaataaacgaaacaaaggcgaacaatgcctgtgaagcccgaaggctccacagacagtgctacttgaaggccttactgtttcttcttaggagcgagcaccatgatcatctggcggccttcgatcttcgttgggaaggattcgaccaccgccagttcttgcaaatcgtctttcacgcgattaagcacttccataccgatttgctggtgcgccatctcacgaccgcggaaacgcagcgtgattttggctttatcaccctcttcgagaaagcgaatcaggctgcggagttttacctgatagtcgccttcatctgtaccaggacggaatttaatttccttaacctggataactttttgctttttcttctgttccttagaagacttgctcttttcatagaggaatttgccgtaatccattatacgacaaaccggcggctcggcgttagggctgatctcgactaagtctactccggcttcttctgctttctccagagcttctctcagactcacaataccaagctgctcgccttccagacctgttaagcgaacttcctgggcgcgaatttcgccattgatacggttagggcgcgccgtttgaactcgttttccgcctttaataccttattcctccaattgtttaagactgcggctgcgaatctcttgttgcaacttctcgatcacttcatttacgtccatgcttcccaggtctttaccacggcgggtgcgaacggcaactttgcctgattccacctctttatcaccacagaccagcatatatgggacgcgacgcaaagtgtgctcgcggattttaaagccaatcttctcatttctcaagtctgctttaacacgaatgcccgcatttgatagtttttgcgtcaattcgttaacgtaatcagactgtgaatcggtaatattcatgataacaacctgaaccggcgcaagccaggtcgggaagaaaccagcgaattcttcggtcaggataccgatgaaacgttccatcgacccaagaattgcgcggtgaatcattaccggtaccttacgctcgttgtcttcgcctacataagaagcgctcagacgagaaggcaaagagaagtccagctgtactgtaccgcactgccatgcacgatcgaggcagtcatacagggtaaattcaattttcggaccgtagaaagcgccttcacccagttgatattcaaacgggatgttgttttcttccagcgcaaccgccaggtccgcctcagcacgatcccacatttcgtcgctgccaatacgtttttcaggacgagtggagagtttgacgacgatcttctcgaagccaaaagtgctgtacatatcatagactaaacggatacatccgttaacttcatcgcgaatttgttcttcagtacagaagatatgcgcgtcatcctgggtaaatccacgcacgcgcatcaggccatgcagcgaacctgacggctcattacggtggcagctaccaaactcggccatacgcagcggcagatcgcgataagacttcagcccctggttgaaaatttgtacgtgacccgggcagttcatcggcttaatgcagtattcacggttctcagaagacgtggtgaacattgcatctttgtagttgtcccagtgaccggttttttcccacaggacacggtccatcatgaacggacctttaacttcctgatactggtactctttcagtttagaacgaacaaacacttctagttcacggaagatggtccagccgtcgttgtgccagaataccatacccggcgcttcttcctgcatatggtacaggtcgagctgtttaccgattttacggtggtcgcgtttcgcggcttcttccaggcgctgcaggtaagcgttaagcgcttttttgtctgcccacgccgtaccgtaaatacgttgcaacattttgttgttgctgtcgccacgccagtaagcccctgccgttttcattagtttgaaatgatggcagaaacgcatgttcggtacgtgcggaccgcggcacatatcgacatattcttcatggaagtacagacctggcttgtcatcatgggcgatgttttcgtcaagaatggagactttgtagctctccccacggttggcgaaagtttcacgcgcttcgtgccagctgactttcttcttaatgacgtcgtagtttttctcagcaagctcatgcatccgcttctcgagtgcttcgacatcttcctgggttaacgtgcggtcaagatcaacgtcgtaataaaaaccgttgtcaataaccgggccgattgccattttggtatgcggccaaagttgtttaatcgcgtgccctaacaggtgcgcacaggagtgacgaatgatctccagaccgtcttcgtctttggcggtaatgatggacagttgtgcgtcgttttcaatcagatcgcaagcatcaaccagttcgccattaacgcgccctgcgatacaggctttcgccagacctggaccaatgtccagcgcaacatccatggggcttacagcgtggtcgtaatggcgttggctgccatcaggaagagttataacaggcattttatatccttatttgcagtggtgacccacacgaaagatcacatacaaagaaaaatttgtttattaacagttcattgcgaaaccatctagccaacaaatgctaaattggttcgcaatcaggtacacaaatgaaagacattaacctctcaccttccacccggttgagcgatgttaacactaaaaaaagggagattgtacctttccgtttcacattgattcgattcgcaattcgtttgtagtgagtacaccagcaaaacgcttaaagaaccactgataacatcacggtgcgtctgaaaggtttactgcgagcggatttacagcagcataaactgaatccagcaaagttcgttgcgtgatttggcggtagtattttaaacgctcatgagattaatgacaaagtggtcatatcacaatgataaaagtgacacaattcttataacaatttttcgtgcacatttcgttctggcgataataattaatcatcatcctcaaaacctccagatatatataaggcgaatagattatgagtcaaaacgatatcattatcagaactcattataagtctcctcatagattgcacatcgatagcgacataccaacaccttcatcagaacctattaataaatttgcgcgccagctcatcaccctacttgatacctctgacttaagttcgatgctgtcatactgtgttattcaggaatttaccgcaaactgtcgaaaaatatcacaaaattgttattccactgccctttttaccattaactttgccacttcacccatccatgcagaaaatatactcattacattacactataaaaaagatttcatttccttattactggaaaccacgcctattaaagctaaccatttgcgaagcatactggattatattgaacaggaacagttaactgctgaagatcgtaaccattgtatgaaactgtctaaaaaaatccatagagaaaaaactatacacccaacagtaaatctcaatggtagtgcatgttttttgcaatctccttctgacgctattttttgtcgccatctgtcattgcaatacgcccttgattcattgagaaatggaaaaggcaaagtcaacctgattaaacattactcctccgttgaatccatacagcagcatatccccttagtccgggatgcggagttcagagcattacttcgccatcctcctgcagggagtcgcgttatcgcgagtaaggattttggcttcgctttagatattttcttttgtcgaatgatggcaaacaatgtcagtcatatgtccgcgattttatatatagacaatcatactttgtcagtaaggctacgaataaagcagtcagtgtatggacaattaaattatgttgtgtctgtttacgacccgaacgataccaacgttgccgtcagaggcacccacaggacagcacggcgctttctctcgcttgataagttcatcagttcagctcccgatgctcagacctgggctgataggtatgttcgcaactgtgcaattgctattcttcctctattacctgagggagttccagttgctattttagcgggtatcacgacacgaatgccatttgcccctatacatccatcggcaatgttgttaataatggccacaggccagactcaatagcttattacactattcaaacagttgcccatactccctgaaaaagaaatcattgaaataataactgcgcagaatagcgttggtacacctgctttatttctggctatgatgaacggacaaactgacaacgtaaaaatatttatgcaagaaatccagtcactggtatacaatcatatcattcatgaagataatctggttaaattactgcaaactaaaagtgctaacgaaacacctggactctatatctccatgttgtatggattcgatgaaataatcgatatctttctgaatgcattaaccactccaatagcacaagaacttttaaacaaaaaaatggtgatggatattttagccatgaaaacacgtgatggtgaaccagggttatttgctgcaatggaaaataatcaccctttgtgtgtcacacggttcctctctaaagtttatgggatcgccgttaaatataaactcagcaaaatcaacatcatggacttattaaaaggcgcgacagcacatggaacccctgctttatacatcgccatgagcaagggtaataaagacgtcgtgttatcttatatatcaacactgagtacttttgcaaaaaaatattcttttagtcaacgtcaattattcacactgttggccgctaaaaatcatgaaaacatgtcagctgttcatatagccattcatcataatcattataaaactgtagaaacatattatgctgctattaatgcaatcagccaaagcctgagttttagtgctgatgaactaaaaacgtatttataaccagctatttatgatatttgtatatcgatacataattttattttttcataaaacgcagaaacagtgatcaggtgtacaacgccacccgacggctgtaataacaaaaaatcccttgatgcctgtcccttttgttacactccgttatcacgcacaagagatatgcaggacactggtatgccgactaaacgctttgataaaaaacactggaagatggtggtggtgctactggcaatctgtggcgctatgttgttgctacgttgggcagcaatgatttggggctgagcagtgacaaacgaagacagccagaccgcataacacggtccggcagataattttacatgctgtagcccagcgataaggttgtccgacgatcggtatgttccggtgcagactctggaggttcagagttccatgtgacgttgtaagccactttcagtccaaaatgttcattaatagcaacatttaatgcgctttcggagttcagcgttgtgtcttccgcgccaaagacggaaacaccctgcgtaaatttagcgttgtcagtcaactgccatgcataagcaccggaggcatagcccagcggctgagtttcactggcattgtcggtatatttgtcgtaacgcacacctggaccgaattcaaagcggaaactgtgtaccgggccattcaaaaactgacgaccataacccgcggtcaacacatcgcgctctcgatagccgttataacggtctgtcagccagcttgcctgaccaaataaatagtcataatcagttaaattaaaacggctacgcccgcccgccgcatatttttctgaagaacgctcatcattagaagaagtattactggcgttcccccacagcgaccaggcagtggtttgtccataccaggtcatggtggtgtcagccgtaagtgaggagcttttcgtattgcctgattgtgcaagatatcctgcgttcagattaccttcgaaaggttttttagcgctggcaggatcgtccatgacagtaaaaacggaatcatcggcagctgcattcagtgacgcaaacatgccccccgccaacataacgatggcaggaactgtcttcaaaagcttcatttatcaagagtccgtacaacaaaaaaagagaccatcgcggtcccggaaactttcttaaggatcaaagattagcgtccctggaaaggtaacgaattataaaaaggcgcgaataacttagcaatgtattcttatttcattttttgaataagcatgtggcgaaaacagatttttatttatatatatttatctgcaaaattttaaataaagctctaataaatcatattgttaatttcttcactttcggctgattcggtgccagactgaaatcagcctataggaggaaatgatggtacgtatctatacgttgacacttgcgccctctctcgatagcgcaacaattaccccgcaaatttatcccgaaggaaaactgcgctgtaccgcaccggtgttcgaacccgggggcggcggcatcaacgtcgcccgcgccattgcccatcttggaggcagtgccacagcgatcttcccggcgggtggcgcgaccggcgaacacctggtttctctgttggcggatgaaaatgtccccgtcgctactgtagaagccaaagactggacccggcagaatttacacgtacatgtggaagcaagcggtgagcagtatcgttttgttatgccaggcgcggcattaaatgaagatgagtttcgccagcttgaagagcaagttctggaaattgaatccggggccatcctggtcataagcggaagcctgccgccaggtgtgaagctggaaaaattaacccaactgatttccgctgcgcaaaaccaagggatccgctgcatcatcgacagttctggcgaagcgttaagtgcagcactggcgattggtaacatcgagttggttaagcctaaccaaaaagaactcagtgcgctggtgaatcgcgaactcacccagccagacgatgtccgcaaagccgcgcaggaaatcgttaatagcggcaaggccaaacgggttgtcgtttcccttggtccacaaggagcgctgggtgttgatagtgaaaactgcattcaggtggtgccaccaccggtgaaaagccagagtaccgttggcgctggtgacagcatggtcggcgcgatgacactgaaactggcagaaaatgcctctcttgaagagatggtccgttttggcgtagctgcggggagtgcagccacactcaatcagggaacacgtctgtgctcccatgacgatacgcaaaaaatttacgcttacctttcccgctaacaaaaacattcccccagcattgggggaatcaccaccaacctgtcggcaacgcgtttctccgactatgctcaaaagtcatgtgataacaaaggggtgaactatggccagtggcgatcttgtccgttatgtcataaccgtcatgttgcatgaggatacattgactgaaattaacgagttgaataattacctgactcgcgacggttttttgctcaccatgacggatgatgagggaaatatccatgagctggggactaacacttttggacttatcagtacccaaagtgaagaagaaattagagaactggtttcggggcttacccaaagtgcaaccggcaaagatcctgaaatcaccatcacgacctgggaggaatggaatagcaacagaaaataaatggtttttgggcaataatcagtctgtggtgtgcgttagctcgtgtttttacaccgcattcttgcgctaaccttatgatctggcagacaacatgggagagacatcatgtggcaggcaatccgtcgtcttttgagcgagcagttaggtgaaggcgaaatcgaactgcgtaatgaactgcctggcggagaagtccatgccgcatggcatttgcgctatgcaggacatgactttttcgtcaaatgtgatgaaagggaactgcttcccggttttaccgccgaagccgaccaactggagttactgtcgcgtagtaaaaccgtcaccgtgcctaaggtttgggcagtaggcgctgaccgtgactacagttttctggtgatggattatctcccacctcgtccgctggatgcgcatagcgcatttattcttggtcagcaaattgcgcgtttacatcaatggagtgaccaaccacaatttggcctcgattttgataactcgctctccacaactccacagcccaacacctggcaacgtcgctggtcaacgttttttgctgaacaacggattggctggcagttggaactggcagcagagaaagggatcgctttcggcaatatcgacgccatcgtcgagcatattcagcagcgtctggcctcgcatcaaccgcagccttctctgttgcacggcgatttatggtccggcaactgtgcgctgggtccggatggcccgtacattttcgaccctgcctgctactgggtgaccgagagtgcgacctggcgatgttaccgctgcatactgaacagccgccacaaatctatgacggctatcagtcagtatccccgctacctgccgatttccttgaacgtcaaccggtttaccaactctacacgctgttaaatcgtgcaagattatttggcggtcagcatttggttattgctcagcagtcattggatagattattagcagcatgatatgggttgaggataatggccgctccgtgcggccttttgattaaataaacccaagcagagaaaagaacacataacctgcagcaatacaaataaccggcaggatatatagtgagaaaaactgcaggaaaatagtatggtgcggaacaacaatacgggactcaatttgttcacgcgttagcccctcttcccctttggctttttccagaatgagttgatcttcaacaccttcccgcaagaagcgcgcctggcgactcatccgggcaccggaatcctgcaacgccagtccgacaaaaatcaggatgaaaatcacccagaacataacgttcacgccaccattaaaattaggggtcggggagttataccagaacagattcaaaaaaggcgtattcgcctgcatcatatcgatcatgacatgagtaaagtcgagcatgaccgcattaatgccttcctggttttcctgccgggtattcataaatttcagcaaagaaatcaatgtagagatcaatgcaggtataaaaatcacccaacccaaaatccttttcaaaacagcaatgcgtccagcttgttgatacgtcatgagttctccttgattaagacgcgtcgtttcacttagtttacctgtagatatctgttttcgcccattctttaaaggcgatatgataggcgcttaatcataagcacggcttaataccttacacataatgctctaaaggagaggttgtaatgtcaaccccgcgtcagattcttgctgcaatttttgatatggatggattacttatcgactcagaacctttatgggatcgagccgaactggatgtgatggcaagcctgggggtggatatctcccgtcgtaacgagctgccggacaccttaggtttacgcatcgatatggtggtcgatctttggtacgcccggcaaccgtggaatgggccaagccgtcaggaagtagtagaacgggttattgcccgtgccatttcactggttgaagagacacgtccattattaccaggcgtgcgcgaagccgttgcgttatgcaaagaacaaggtttattggtgggactggcctccgcgtcaccactacatatgctggaaaaagtgttgaccatgtttgacttacgcgacagtttcgatgccctcgcctcggctgaaaaactgccttacagcaagccgcatccgcaagtatatctcgactgcgcagcaaaactgggcgttgacccactgacctgcgtagcactggaagattcagtaaatggcatgatcgcctctaaagcagcccgcatgcgttccatcgtcgttcctgcgccagaagcgcaaaatgatccacgttttgtattagcaaacgtcaaactctcatcgctgacagaactcaccgcaaaagaccttctcggttaatggccaggggcagtgatctcgctgcccctggttctttatctgaatttgcattcaactgacggattaatcgtcaatttaagagaaagagttacaccgtcaccacttccgtgcactgtataaaaatcctatactgtacgtatcgacagtttagtgagttttatcatgacggcggaaggtcaccttctcttttctattgcttgtgcggtatttgccaaaaatgccgagctgacgcccgtgctggcacagggtgactggtggcatattgtcccttccgcaatcctgacgtgtttgttaccggacatcgatcacccaaagtcgtttcttgggcagcgattaaagtggatatcaaaaccgatcgcccgcgcttttgggcatcgtggttttacccacagtctgctggcggtatttgcgctgctggcaaccttttaccttaaggttcctgaaagctggttcattccggctgatgcgctacaaggaatggtgctgggttatttaagccacatacttgccgatatgctgacacccgccggtgttcccctgctctggccatgtcgctggcgtttccgcttgcctatcctggttccccaaaagggcaaccaactggaacgttttatctgcatggcattatttgtctggtcggtatggatgccccattcattacccgaaaacagcgcggttcgttggtcatcgcaaatgatcaataccttgcagatccagtttcatcggcttattaagcatcaggttgaatactaaaaaggcaaaaatcacctttctggaataagcaattccatttgaatataagagccagctcacagttctgttaatcttgcgccaacactatgactgctacgcagtgatagaaataataagatcaggagaacggggatgaactttccattaattgcgaacatcgtggtgttcgttgtactgctgtttgcgctggctcagacccgccacaaacagtggagtctggcgaaaaaagtgctggtgggtctggtgatgggtgtggtttttggccttgccctgcataccatttatggttctgacagccaggtacttaaagattctgtacagtggtttaacatcgttggtaacggctatgttcaactgctgcaaatgatcgttatgccgttagtcttcgcctctattctgagcgcggttgcccgtctgcataacgcatctcagttaggcaaaatcagttttctgaccatcggtacgcttttgtttaccacactgattgcggcgctggtcggtgtgctggtcaccaacctgtttggtttgacggctgaaggtctggttcagggtggtgcagaaactgcacgtctgaacgccatcgaaagtaactatgttggtaaagtctctgacctgagcgttccgcagctggtcttgtcctttatcccgaaaaacccgtttgccgatcttaccggagccaatccgacgtcaattatcagcgtggtaatttttgccacattcctcggcgtagctgcattgaaactgctgaaggatgatgcgccgaaaggtgaacgcgtcttagccgctatcgataccctacaaagctgggtgatgaaactggttcgccttgtcatgcagttgaccccttacggcgttctggctctaatgaccaaagtggttgcaggttctaacttgcaagacatcatcaaactgggaagtttcgttgtcgcgtcctacctcggtctgctgattatgtttgcagtgcatggcattctgctgggcattaatggcgtgagtccgctgaagtacttccgtaaggtatggcctgtgctgacgtttgcctttaccagccgttccagtgctgcgtctatcccactgaatgtggaagcacaaacgcgtcgtctgggcgttcctgaatccatcgccagtttcgccgcctctttcggtgcaaccattggtcagaacggctgcgccggtttgtatccggcaatgctggcggtgatggttgcgcctacggttggcattaacccgctggacccgatgtggattgcgacgctggtcggtattgttaccgttagttccgcaggcgttgccggtgtcggtggtggtgcaactttcgccgcactgattgtgctgcctgcgatgggcctgccagtaaccctggtggcgctgttaatctccgttgaaccgcttatcgacatgggccgtacggcgctaaacgttagtggctcgatgacagctggcacgctgaccagccagtggctgaagcaaaccgataaagccattctggatagcgaagacgacgccgaactggcacaccgttaattcttatgctggcaacggtccgttttgtataggggccgttgctttactttttaaatgttccatcgcggcgatgcatactgactcatatttaaacagatcgtcagcgaaaaaaatgtccaacttatcaatacattcctggctcaatgaatgtgcctgtagtgagaagcttaaaacctcatacccgagacgttccctaagtgaactatctggaatactcataatatcttcaagcacaccacttcccattcccggaagatttagtggattaaaaagaagattgatattaagcattgatattatcgaaggaaactttaggagactctcattttttgaatcgcagcaaaaatgctcccggcaggatgtatataatttttttcatagtatatagtccttaaataatgaataactaacctattttttatattgatcaaattcgtcattttttcgggtcagaattcacaggtaaaatccatcccaacaaaattctcattaatatctcttatccgaaactcactgccataaagattattaattatcactctatatttaacattgtcctgcagatacgtatcaaaactaagtgctggcgctcctggctttgaggcatcatagttaatgttagacatataggcaatcatacgattgaagttcgactctgctatttcatcgcagtcacattgacccgttgatataaagaaagtgagtgccgccatggtagactcaagcctttctttaaaagagtcgaaagccaggcttttaatatttaaatcaccataattactctgtattaagtttgtagaaaacatctcccgccccatattgttaacaaaattattatctcatttaaatctaagtcacttacaatataagtttaagagcgacgccacaggatgaactatcaaaaatagctcatcatgattagcaaaacttaaccattttaaaataaataaacaattaaagaaaaaagatcacttatttatagcaatagctcgtcaaaggcagctttttgttacaggtggtttgaatgaatgtagcaacgaaatgcagaatttcaggtcatgtaactcccggcaaaaccgggaggtatgtaatccttactcagtcacttccccttcctggcggatctgatttgcccaacgttgggcagattcaggcacagtaaacgccggtgagcgcagaaatgactctcccatcagtacaaacgcaacatatttgccacgcagcatccagacatcacgaaacgaatccatctttatcgcatgttctggcggcgcgggttccgtgcgtgggacatagctaataatctggcggttttgctggcggagcggtttcttcattactggcttcactaaacgcatattaaaaattagaaaaactgtagtttagccgatttagcccctgtacgtcccgctttgcgtgtatttcataacaccgtttccagaatagtctccgaagcgggatctggctggtggtctatagttagagagttttttgaccaaaacagcggccctttcagtaataaattaaggagacgagttcaatgtcgcaacataacgaaaagaacccacatcagcaccagtcaccactacacgattccagcgaagcgaaaccggggatggactcactggcacctgaggacggatctcatcgtccagcggctgaactaacaccgccaggtgcacaacctaccgcccctgggagcctgaaagcccctgatacacgtaacgaaaaacttaattctctggaagacgtacgcaaaggcagtgaaaattatgcgctgaccactaatcagggcgtgcgcatcgccgatgatcaaaactcactgcgtgccggtaaccgtggtccaacgctgctggaagattttattctgcgcgagaaaatcacccactttgaccatgagcgcatcccggaacgtattgttcatgcacgcggatcagcagctcacggttatttccagccatataaaagcttaagcgatatcaccaaagcggatttcctctcagatccgaacaaaatcaccccagtatttgttaggttctctaccgttcagggtggcgctggctctgccgataccgtgcgtgatatccgtggttttgccaccaagttctatactgaagagggtatttttgacctcgttggcaataacacgccaatcttctttatccaggatgcgcataaattccccgattttgttcatgcggtaaaaccagaaccgcactgggcaattccacaagggcaaagtgcccacgatactttctgggattatgtttctctgcaacctgaaactctgcacaacgtgatgtgggcgatgtcggatcgcggcatcccccgcagttaccgcaccatggaaggcttcggtattcacaccttccgcctgattaatgccgaagggaaggcaacgtttgtacgtttccactggaaaccactggcaggtaaagcctcactcgtttgggatgaagcacaaaaactcaccggacgtgacccggacttccaccgccgcgagttgtgggaagccattgaagcaggcgattttccggaatacgaactgggcttccagttgattcctgaagaagatgaattcaagttcgacttcgatcttctcgatccaaccaaactgatcccggaagaactggtgcccgttcagcgtgtcggcaaaatggtgctcaatcgcaatccggataacttctttgccgaaaacgaacaagcagcattccatccaggtcatattgttcctggtctggacttcaccaacgatccgctgttgcagggacgtttgttctcctataccgatacacaaatcagtcgtcttggtgggccgaatttccatgagattccgattaaccgtccgacctgcccttaccacaacttccagcgtgatggcatgcatcgtatggggatcgacactaacccggcgaattacgaaccgaactcgatcaacgataactggccgcgcgaaacaccgccgggaccgaaacgcggcggttttgaatcatatcaggaacgcgtggaaggaaataaagttcgtgagcgcagtccatcgtttggcgaatattattcccatccgcgtctgttctggctaagtcagacgccattcgagcagcgccatattgtcgatggtttcagttttgagttaagcaaagtcgttcgtccgtatattcgtgagcgcgttgttgaccagctggcgcatattgatctcactctggcccaggcggtggcgaaaaatctcggtatcgaactgactgacgaccagctgaatatcaccccacctccggacgtcaacggtctgaaaaaggatccatccttaagtttgtacgccattcctgacggtgatgtgaaaggtcgcgtggtagcgattttacttaatgatgaagtgagatcggcagaccttctggccattctcaaggccctgaaggccaaaggcgttcatgccaaactgctctactcccgaatgggtgaagtgactgcggatgacggtacggtgttgcctatagccgctacctttgccggtgcaccttcgctgacggtcgatgcggtcattgtcccttgcggcaatatcgcggatatcgctgacaacggcgatgccaactactacctgatggaagcctacaaacaccttaaaccgattgcgctggcgggagacgcgcgcaagtttaaagcaacaatcaaggtcgctgaccagggtgaagaagggattgtggaagctgacagcgccgacggtagttttatggatgaactgttaacgctgatggcagcacaccgcgtgtggtcacgcattcctaagattgacaaaattccggcgtaaatatggataaggtcacgtcccctggggagtgaccttaccaccttacttacacattaagataactacccaaccgataaccacgctcagcaattgcatatttcaacgacgctgatgtcagcacttccagctccgttaaccgtgggaaacagtaagcactctgacggatagtattatcgataaacgcaggatgacacatcacctccagcgaaagatcaccccgatggcttgcgtcatccagcacttgcaggaacagtgcctcgctaatctcttcaccataaaacgcgctactgaatccctgagaactgcgcagattagccggtaaatcaccagagttagatagcggctgacggtcgatgcgcaacgcaatcccctcttcagccgcaaacctggcaacaatcgggaaaatctgcgggaacatatgcacatgatgatggctatcaagatgcgtaggtttgcgtccaaatagctcaatgaaacgcaaatactgactggcaagctcctgagtaatttcttccagcggtaaagcatcttcttctgccaactgccagatccattttcccagcacaccatcgcgggttaaccccggcatagctgtcagtggcttgcccatagtaaggacaaagtgcatccctatggccagactcggttcatcacgactcaactgcaccgcatggtcaatagcctgcccattcaccagcgccgtcgtcgatgtgacaatcccattgcgacaggcctcgataatgccgtagttctgacctttgcttaagccaaaatcatcggcattaacaatcagtaagcgttccataatcagcctcggttaatgtgcttttttaagctctgcgatgcagtcggcaaaatttggcagccatttctcgtgcgccagaatcatctcgcgtgccagcagctcagcatcgcgatcggaatgcaccaacggactaaggtttagcgccagtaacacatcgttaaattctccgctaagtgcggcgttgctggcagcaatctcgaagcctttaatggtgtgaatcagccccatcactttatcatcgaaatgcgtaatgcgcggatgtggcgtcgcgccatcgcgccccagcttacaggtcatttctaccgcccagtctgccggaatattatcaatatgcccatgatgcgggatattaacgtaatgttcagcttgcttgtcgttgtagatagcgttgatcacttcgcacgctgcatcagagtaataagccccaccgcgctgttccagttctttcggcttaactttcaactccggatttttatacagctcaaaaagttgtttctcgactttctgtactacctgtgctcgtgcgccgcctttgtagtattcgcccatttcaatagccagcatctctttctgcttgaagtaatacagcagataagaacatggcagcagatttaacgaacgaattaagccctcactaaatggcagatcgaaaatattttttacagaggacgcttttaactgccctgacgccacaccatcaagcaattcggcaaagcgcgacttgccatttaccagcacatccttaatgaacaccatatggttgaggccgaacagatcgatagataaatcatcgctgtctttcagcatcagaacatcgcgaataaacatcttcatgccgatcggaatattacacacgccgataaagcgtttaaatccggtatgacgataaacggcttcagtgaccattcccgccgggttagtgaagttaatcacccatgcattcggacaaagttcttcgacatcttttacgatgtcaaaaatcaccggaatggtacgcagacctttaaacagaccgcccgcgccgttggtttcctgaccaagataaccatgacttaatggaatacgttcatccagttcgcgcgccggtaattggcctacgcgcagttgggtagtaacgaaatcagcatctttcaatgcttcgcggcgatccagcgttttataaagcttcatcgggacgccagcgttatcaatcatccgttggcagagttcaaaaatgatatccagtttctctttaccatcttcgacatccaccagccataattcgctgaccggcaattcgtgataacgcttaataaatccttccagtaactccggggtatagctgctcccgccaccaatagtgacgacttttaatttctggctcataatttctcccttcagtacagaatactgatatctggcatatctgccccccggacataaataatccagcaacaggacagatatgtgaattgtcaggtataacgacttactgattaaattcagtcaatttcttacgatagctcttaggcgtaaaggacgttaatttcttaaacgttttaataaacaaactcgggctactataaccggcctcaaacgcaatatccgtcacggaatagttggtcatttccagttgttttttggcaaaattaatacggatctcattaataatctgcattggtgttttgccataatatcgttgagtcgctcgcgtcaaatattcctgtgatttggctgacaacgtcaccatattctccagcgccgattcactaaactgctctttatcatgcatcttttctaccgtacttttcagccactgcggtacatcatcaatcacctgttcttcgcggtaatgacgtaaacggttaatgacataaaaagtaaccatctcaacaaactcttccagccctgtttcgcggaaattcaatgaagaaatcactgtttccacataggtgagaaaagcgttattggtccggtatacctgcgaagcgacaaagcaataaggcaacaacggcaggtaatgctgctcaaaaaagcgtttactgatcccaacgttcaatatacgcgtggcaccaaactcataaaaactttgatggtgcgaacctaacggaataaaaacaaaatcgccccgttccagtaacacgcgcttaccgttaatctcctggaaataacgcccggttaataccagagtaaattcataatagtcgtgctgatgcagcccgctgatactctcagttttgttatagataaacacatggaagtttttgccattaaacaactgctgttctcgggcagtggcaatttccggcgcgttaatcactggctgcatcatcgactccttatgccttcagtttttcatgaagctcaattaattcagtaatcagttcacgcgcaagcatggacgtcattaaatgatcctgagcgtggaccagcaccagactcactttcatcttaccttcgcccgcatcgccttcaatcagtttcgtctgtaccagatgcgcttcattcaatgccatccgtgactgatctatcatggcttttgctgcagcaaaatcgccctgcttcgcctgtttcagtgccgcatacgccaggctgcgcgcttgtccggagttgatgataagccccatcaccacttcttccagctcttcagcttccgtttgcgtatcgggaatgttatcgagatccatcatacatcgttcctctctattcttaccggcacgattacccgtaccggcatcgattaaaatttcagggcgttagcgatatcttcttcgctctcttctttatcaatcgcgttttgtgctttgttagccaccacaacaaagggcagataaattaacgttgcgataccaaggttgaagagtgcgaccagcaatgcggcgacgctaccgttggtgttaaagaaggctcccagaccggttggcatggtccacggtgcaatattggtcaccggaggaatgatgcccatgtagtacgctgcgagggtgattgccgccagaatcggttgtaccagtacaaacgggataaacatcaccgggttcatgataattggcagaccaaacagaatcggttcgttaatctggaagatgccggacggcagcgccagttttgctacctgacgataatcagcacggcgagaggcgataaagatagccaggatcaggcctaaagtcgcaccactgcccccaaggaaaataaaggagtccagcatcggcttggcccagatatggaaggtcttaccggctgccagcgccgcttcgacggaaccatattgctgataggtcgcgatattttccagcgcccacggcgtcataatgccgttgtccagtgcggtcagcgccagcgcgccatgaataccgaagaaccagagcagtggaacaaagatcacataggcccagcccaccacgctacccaacgatgccagtggggttgagatggtatccataatgatctgatggaagttggtgccccaggtattcaacgcccaggcaataatccccatcacggaaagaataataaagccgggaattaatgccgagaaggaacgcgatactgaagcaggtacgctgtcgggcagtttaatgacccaattgcggcggacaataaaggtaaacatttctgccaccaccaggccaataataatcccggagatgatattcgccccacctaaccagtttgcgccaaccgcataggcctcaccgacactatatggggtgacggtcataaatgctgcaacggataacaaccccgccgccagcgcatcgactttacgctcttctgccagcgccatgccaataaagaacggtgccattaaagacattatccctaatgttccgttatatacgttgccgccaatacctttcaggccattaagtgtttcaatggttgaggcgtcgaggcgaatacctaaggaataaaaaaacgacccctccccaaagcttagaaaaacgttgttaattaatacaaacatggcccccgcaagggttaacggcattaagcgaataaagccatttttgattgcattaacgtgtggctgctttcctattttaactgcaaaagggaggagtaccttttcaagcgatgcaataacattactcatagaaaaatacccttaaaaaccgcaatttaaatattgcggtattgatttatgaaataactctttgacgggaaaatttaaaataaattaatttgctgcggcttttttaatcgctgcaaccgcagccttaagcacgcctaaaccatcgactttgccataaagcagcgagtcaattacttcaaccggtttgttgggtaacaaacgctggatttcgggcaacatataagcaatctgcggccctaataacacgacatcggcattctgacctttttcaccagccagtgtttccggaaatgcttcaataatgaccggaacttcatatttttctgcctgtgcgcgcatttttgataccagtaaagaggtagacatgcccgcagaacaaaacagataaatgtgtttcttttccataaaactgccctcatcgacgattatctgtcagccagacactccgcaagccttaacctgcttccatgctctgggtaacttgcgaaaccaacatgactttttttgtggctgaaaggagtatacggtatagacctgagcaatagtatttctttgaccttataaattgtctctccttgacctgcggttatgaccctcttcacatttcgggcaaataattcgcgaagataattaagaactcaggccaaaaaaaaccggcacaatggccggtttccgttgttactcaagctttcagacgaattgattacttcgcagcctgtggatcagtgtcgtattcagcacaggtctgataaccggagttgatgacatgtccggtatcatctaacgcgacaaagtaggtttctgctttaccatcacgttgacccaggatgtaggtctggcaagtaccacgagcatggatcatgctcacttcagacgaaggtttacccgcaatttgtgcaacctgcgcccggctcatgccttttttgacgtctttcaccacaggctgtacaaactggtctttagtacgatcataagccgtacaacccgccagcatggttaataccgccgctgcactcagaattcctgccatattcttgttcatattccgtcctcttgtttatcagcgtgttagataagcctggaatacattgggcgctttttcaagcccgtgaacgaaacggctccgctttcagaggattcctgtatgacgttttaaccaccattcagcccgctgtcgcttgtcgtttcagtagcaacgggttagctttaaggaagttttgtcttttctgtctggaggggttcaatgacattgcaacaacaaataataaaggcgctgggcgcaaaaccgcagattaatgctgaagaggaaattcgtcgtagtgtcgattttctgaaaagctacctgcaaacttatccgttcattaaatcactggtgctcgggatcagcggcggtcaggactccacgcttgccggaaagctgtgccagatggcgattaatgagctgcgccaggaaactggcaacgaatcactgcaatttattgccgtacgcctgccctatggtgttcaggccgacgaacaagattgccaggatgccattgcctttattcaaccggatcgcgtattaaccgttaatatcaagggcgcggtattggctagcgagcaggcattgcgggaagcaggcattgaactgagcgattttgtccgtggcaatgaaaaagcgcgtgagcggatgaaagcacaatatagcattgcgggtatgaccagcggtgtcgtggtgggcaccgatcatgcagcagaagccattaccggattcttcactaaatatggtgacggcggtacggacattaatccgctgtatcgtctcaacaaacgtcagggtaaacagttactggcggcattaggttgcccggaacacctttataagaaagcgccaacggccgatctggaagatgatcgcccttctctgccagatgaagtggcactcggcgtgacctatgacaatatcgacgactatctggaagggaaaaacgtacctgaacaggtcgccagaacaatagagaactggtatctgaaaaccgaacataaacgccgtccgccaattaccgttttcgatgatttctggaaaaagtaataatttgcacctattggtttgtgcgaaaaagagtaatttgttcacgccggatgcggcgtgaacgccttattcgacctacaaaactatgcaaattcaatacattgcaggagtcgaataggcctgacaggcgtagcacgtcagacggtgtaacctttgtcatcaacccgcctcttttttaatcgcctcccgcctgttacactggatagataaccagcattcggagtcaacagtggtacggcgtttaacttctccgcggctcgaatttgaagctgcggcaatttatgaatatcccgaacatttacgttcattccttaatgacttacccacccgaccaggggtgtatctgtttcatggcgaaagtgacaccatgccgctctatatcggcaaaagcgttaatatccgcagtcgggtgctttctcatttacgcaccccggatgaagccgccatgctacggcaatcccggcgaattagctggatctgcaccgcaggcgaaatcggcgctctgctccttgaagcgcgattaatcaaagaacaacagccgctgtttaataaacggttgcgccgcaatcgccagctctgtgccctgcaattaaatgaaaagcgcgtcgatgtggtgtatgccaaagaggtggatttttcacgagcccccaacctgtttggcctgtttgccaataggcgcgcagctttgcaagcattgcagagcatcgctgatgaacaaaaactttgttatggcctgttgggactggaaccgttaagtcgcggtcgtgcatgttttcgttcagcgctaaaacgttgcgccggagcatgctgcggtaaagagagccatgaggaacatgcgctacgcttgcgccagtctctggagcgtttgcgggtggtgtgttggccttggcaaggtgcggtggcactgaaagaacagcacccggaaatgactcaatatcatattattcaaaactggctgtggctgggggcggttaattcgctggaagaagcgacaacgttaattcggacacccgccgggtttgatcacgacggttataaaattctttgtaagccgctgctttccggtaactatgaaattactgaacttgatccggcgaatgaccagcgagccagttgatttcactgaacaacagtttaccttgcggttgtaaaagccgcagggtgtgcctgccatcgaaccagcacgcgccctggtcggtagtgagcaatttatcgcccagttgccacgccccgttaatcacaaacaccaccccgccgcatgagccaaaggtagtaaacgtacgttcggcaattctgactttcgccttacagacatccaggcgtgtcatgatgttgaaatccatcgacatctgccctgccgtcagtttcgcttttaccacctggtccgctgcaaaggcaaaaggctgtaacggttttaaggtatggttaaagcggtctgcgctttcaaggagcatctcgccgccttccagcaacgtcactatcctttccatgccgggaaacaaagaaaactccccattcgccgcgatggatgcaatgctggcacgccagtaaaaatcacgttttgccggtgggaaagtgcaaatttcgcgcgtttcaccggcagcatttcgccacagattcaccgacattttacgcatatcaaagtattccatactcgctcccggcccgttcttttcattgttatcgttcaggtaaccgtggatggttatcggcaactcgggtgatttacgttagtggtgatcaggctttttttacaactgtttgagaagagaaaagaaaaccgccgatcctgtccaccgcattactgcaaggtagtggacaagaccggcggtcttaagttttttggctgaaagattattcagcagttgcaggcattttaccttttgccgctggacgttctgtcagacgcttctcaaaattagcattaaattgctttttctgttccggcgtcaggatgttgtaaattttgttctgggtttccatgtgcgccagcatgttagctttgcgctgttcttccatttttgcgatctgcgcttcagcttttgctttatcgaaggtatcgctggcaatgatgtcatgcattgcgcggcgttcttccagcggcggacgtttcatctggtcacgctggcctttcatgatttcgcggatctgctgtttctgcgcgtcggtcaggttcaggtctttgaacatcatgtcctgatgcggaccgaacttgcctttgtggtgcatcatcggcttcgcgtcagccggtgctgcggtagtggtgtctgcggcatgggtcaggttagccgcgccaagagccagggtagaggcaacaaacagtgcagttaatttacgcatattctatatccttcctttcagttatttattacggctttcttaagtagcgtgccgtgttgacgagattaactttactgactttagcgtcaattaatcagagcaacggtaaaacaatgaaagtgtaaaaaacacttttgcgccaattatggagaaaaaaagaaaatttgatggagagtgatgagagaatattacaacacgatgattttgcagagattatgaagaactataccggatgactggtgataaataaagcaaataaccaggattaatctgtattaatttataagaaagcaacttaatacccgcagaatgatttctgcgggtaagtattagcttattttttcgagcattaatcccgcgcgtaatcccaacgctaccaacggattagggaataacacatactctacatcatgggttacggtaaaacgttcctctccgtcctgcgccagcaatgttcctttctcaaacggcataaaattcagcgtgtcacttgccatatgcatttcgaaggacggcgagtggcgagtaatttgcgaaaccacccgataacggagcggcggtgttctcacgataccgacactctcaccagatagcagcgcagcaattgcgctggcagttactgcaaactggcgaagatcgttttgcccaaagggcaacgctttgccaagttccagcgtacaggccagcgcgccaaaatgtctggcgctgaaatgggtaaacgtaccaccaggttcctgatggaacaccagcgcctccagccccgccgcacccagccacgtcagaaatttctcgtcccagggaatgtcgcgttgcggtaatacaccgaactgcggatgcaaggagccacgaattgcggtatgtagatcaaggtgccagcgcacagattctttgcccaggtcataaaaatcttccaggcactgttccagttcgcgcgcccgacaggtttctccgctttcagcaaatagctgccaacgaccgccaaacattcgattcatatcgctatggcaataacgtttccctttcttcagcgcaggaggattcccgaggatcaccagcaaccgccaacgtaacgggatctcgccgtgagatatcgcgccaagcaacgcgtccagcatctccacaggtgccgtctcattaccgtgtattcccgctgaaatcaccagtgcgccttgcggtggcgttaatggcgtcagttccagcacaccatcgcccagccagcgccagcgaacgccgttgatttctcgctcggtgataaccggttttttacccgttaaggtcagagcaagaaaattatccattgccccctccctcgcgctggaacggataaaccgaaccgagattcagtaattggctcaatacatccagtgcttcccgccctccgcgcagcaattgcgggtcggccagatcggcagcagtaaggcgatcgcggtagtaacgatccacccagtcattgagcgcattaaacagcgtatcgttcatcatcaccgccggattcaccgcccggcgttcttcttctgtcaataccacccgcaaccgcaggcacgccgggccgccgccattcgccatgctttcacgtaaatcaaagacttttagttcgctaatcgggttgtcagcggcaaggagttcattgagataaccccatactccggcgtgttcccgacactcctgaggcagcaccaacatcatggaaccatcatcgcggctcaacagttggctgttaaacagataggtagacaccgcatccgacacggaaacctgagttgccggaacttctatcgccataaaaccgttcacccgcgcacgcaggtttgccagtaactgtgactggcgagcgaacgcctgttggtggcaaaacagcacctggcggttactcacggcaatcacgtcattatgaaaaacgccctggtcgataacgtccgggttttgctgggcgaaaatcacctgttggggattcacctgattcagccttgccaccgcctcgctggcttcgcgagtctgtcgcgccggataacgggaaggccgggtatcattgccttcttctcgcccgtagacaaaaagttgcatacccggctcaccgtaatgaccgccgagacgattgtggtttgccgccccctcatcaccgagcaacgctacctgcggcaacgccgaatgaacgctaaatttctcttcgtcgttaaaaatcgcttttaaaagtgattcggtgacgtgcgcttccagcgagcggtgaaatttattgttcaggttggcaacggtgagatgcactttgccatccagcgtatcggcagatggcgcgatcgttgccgcattggctacccacattggcgaagcggaactgacgctggaaagccagtgcggtgcctggcgtgcaactttttccagtacctgctcatcgctaccactgaatcccaactgacgcagcaccggaataaacggacgctcgtgcggcgggatcacggcctgggggaatcccgcatcggcaagggctttcattttcagtaagccctgttttgccgcctgtcgtgggttagacacctgaaaacggtgacgggtagaggcttcattaccaaacgacaggccagcgtaatgatgcgtcagccctaccagcccgtcgaaattaacttcccaggcgttcatcgcaccacctcatcggaaaaatccagcccggggttaagcgttgcgggcaaagttaacgagtccgactccaggctcgccataggccatgcgcagtaatctgcggcataccaggcgctggggcgatggttaccggatgcaccaatgccgccgaatggcgcggtactggcagcaccagtaagcggtttgttccagttaacaatccccgcccgcgcctccagcaacagttgatcgaatttttcccgctcgggggaaaccagaccgcaagagagtccgaagcgagtgttattcgccattagaatcgcttcctcgaaagaatcataacgccagacgcgcaataacggtccgaacacctcttcatctggtacgccagcaacgcctgtcatttcaatgatccccggcgtcagcaacgatgtctctgattgtaataagcgcggcgcaagcagggttcgtccgcccatcgcttccagttgctgccaggcagtaaccacctgctgtgcggcctgttcagaaatcagcccgccaataaacggctgcggttcgtcatcccagttgcccggcgttaatcgctggctgacggcaaccagacgagcaagaaacgcatcgccctgcgctccgcttttgagcaataaacggcgggcgcaggtgcagcgttgcccggctgtgacaaacgccgactgaatggtcagatggacagccgcgtcgatatccgccacctcatcgataattagcggattattaccgcccatctcaagggcgagaattttctccggctgaccggagagctggcgatgcagctggtagccggtattggcgctaccggtaaacagcaaaccgtcgagatcctccagcgcactcagcgcctgacccgtttcacgcccgccctgcaccaggttcagtacgcccggcggcaagccagcctgctgccataaacgcattaccgcttcgccactccacggtgtcagttcgctgggtttaaagataatggtgttacctgccagcaatgccggaacgatatgtccgttcggcaaatgaccagggaaattatacggcccaaacaccgccagcacgccgtgcgggcgatgtcgcaggctcgccgcaccgtccggcatttcactacgctgctcgccggtacgaacgtgatacgccttaattgatatcgcgattttattgatcatcgccgtcacttcggttgccgcttcccagcgcggcttacccgtttctctggcaataatcgcggttaattcgcctttattcctttccagcaatccggcaaagcgttcgacaacgacctgacgttcagccaatgagagccgcgcccagcgcggaaacgccgcacgggctgcccgacaagcctgttcgacctgagcggcatcggcatcattgccttgccataacacctcgcccgataccggattacgcttcacacgcgatgcgccctggcccgttatccagtcaccgttaatccataaagtcatgctgttttctcctctgcgcacaggcgcaccagacgaacgcgatcccctgcgtggcatttgagggcatccagttgttcggcggttaaaatcaaacgctcggttgccggatcggtacgcgccagcaccacgcggaaatggtgataattttcattggcgaccaggcaggccggaaaatcgccctgcgcaggctgcccttctgccacttccaccagccgacttttacgaatggcgcgcacgcggtcgatgtcacactcaagcgttggcccgccgtcgaagatgtcgatatagttgcggtaacgaaaaccttctttctccagcaccgcgcgggcaggcgcggtttgcggatgtacctgaccgatgacgtcctgggcttcctgggataaaaagtgggtatagatcggatgtttcggcatcagttctgcaataaatgccttttgcccggtgccgcagagaaaatcggcgcggctaaaatccatcgaaaagaagcgtttaccgagctttgccagaacggtgaatagccgtgttcgtcaatcaccccgcgcatttcagcaaccactttgtcattaaacttgtcgcgaaaagccgccataaacataaagcgcgatttcgacagcaaatagccgttgccctctttgcgccagtccgggtcgagaaacagcgtgcacagctcgctgctgccggtgtgatcgttactaagaaacagcgtcggcaatgcgttatagacattcagctcttttgaggcgtgaaccaacgtgccgacgcgatagttgtaccagggatcgttcagcccaaccgccacctcaatggcgcaaatccccgccacagtgcctgtctcgctatcttccagcacgaacacatagccctgctcgcttttgggcagttcgccttgccaggttttgattgccctttcgatacgcgccgaaagcgtggcttcattggcgggaagcgacgtcaggccgccgcccgttttgctggcaagttgcattagcgccgagacatctgagcgctcaacgggacggatgaccatcatgatgaacctcggctaacaaagtgttcgcaagcagctgcaaagcgatccagtccggtcgtcacctcttcttcgctgacattgagcgcaggcgcaaaacgcaccacattaccgccagcaatcagcaccatcacgcccgctttcgccgcctcctgagagatctgtttcgcttgcccggcgtaatccgcattcagcacacagccaatcaaaagacctaagccgcgaacttcactgaacaaaccgtagcggtgattaagggtattaagacgctcaacaaaccagtcgtgacgctgcttaacgccattaagcatctctggtgtgttgatgagctccagcactttgcccgccaccgccgaggccagcggattgccgccataggtggtgccatgagtgccaacggtcatcacgcgggcgcactcttcggttgctaacaacgcaccgactgggaaaccgccgcccagcgctttggcggtggttaacagatcgggcgtcacgccgtagtgcatataggcatacagctcaccagtgcgcccgacgccggtttgtacctcatcaaaaatcagcaaggcattgtggcggtcacacaattcacgcagaccttgtaaaaatgcgttgctggctggcaccacaccgccttccccctggatgggttcgacaatcaccgcacaggtggcgtcgtcaatcagcgcgctggcagagttaatatcgttatatgcagcatgacgaatatccggtggcagtggcgcaaaatcctgtgaataggctggctgccacccgcactgacagtaaacagcgtgcgaccatgaaacgcatttttgaacgccacgatgccgctcttatggctgccgtagcggtcatgagcgaatttacgcgccagttttagcgccgcttcgttggcttccgcaccggagttacaaaagaagacgcgatcggcaaacgtggcgtcgatcaattttttcgccagtcgcagtaccggctcgttggtgtaaccgttgccggtatgccagaacttactcgcctgttcgttcagcgcttcacgcagttccggatgcgcatggcccagcgcgttcaccgcaatgccacccgcgaagtcgatatactctttcccctgctgatcccacaagcgcgaaccttcgccacgtaccggtataaagggtgccggagcgtaaacaggtatcatccattcattaaagttttcacgcgtaattggctgagacatagcgacctctacagtaaataattcgttatttatatgttaacaataagtaatgtttgcgctgtaaatgtagattgcagggttcgtgccagccagtgataaaagtgcataaacggcggaggctaactggaaatcaaggagttataaccaaaccatatgcatttaaagtgcatataaagtgaatacgtttgcgatgtgggtgaataaaaagaataaaaaacgcaatgttatgcagaagtaaaatataattctggaattgtgatcattgacgaaatttactggaaattactgcgccattctgacgcagcgcgcaccaaaagcgggcattttttgcgccatcgttgacatcattaacaaccatcgatcaaatcacttaacaacaggcggtaagcaacgcgaaattctgctaccatccacgcactctttatctgaataaatggcagcgactatgaaatttgtctcttttaatatcaacggcctgcgcgccagacctcaccagcttgaagccatcgtcgaaaagcaccaaccggatgtgattggcctgcaggagacaaaagttcatgacgatatgtttccgctcgaagaggtggcgaagctcggctacaacgtgttttatcacgggcagaaaggccattatggcgtggcgctgctgaccaaagagacgccgattgccgtgcgtcgcggttttcccggtgacgacgaagaagcgcagcggcgaattattatggcggaaatcccctcgccgctgggcaatgtcaccgtgatcaacggttacttcccgcagggtgaaagccgcgaccatccgataaaattcccggcaaaggcgcagttttatcagaatctgcaaaactatctggaaaccgaactcaaacgtgataatccggtactgattatgggcgatatgaatatcagccctacagatctggatatcggcattggcgaagaaaaccgtaagcgctggctgcgtaccggtaaatgctctttcctgccggaagagcgcgaatggatggacaggctgatgagctgggggttggtcgataccttccgccatgcgaatccacaaacagcagatcgtttctcatggtttgattaccgctcaaaaggttttgacgataaccgtggtctgcgcatcgacctgctgctcgccagccaaccgctggcagaatgttgtgtagaaaccggcatcgactatgaaattcgcagcatggaaaaaccgtccgatcacgcccccgtctgggcgaccttccgccgctaatttagcagctctcctggctcaaactgggtcaggagaattaaccttgagaaaaatcaacaaactgtcagtaatgatttgttgcctgccgtcctttgttataccgtcactgcgtttttagttgtctgaccacttctctattatcaagtttgatataggaaactccacgatgaacgctgagcgtaaatttcttttggcctgtcttatttttgcgctggtcatttacgctatccacactttcggtttattcgatctgctcaccgatttaccccacttacagacactcatccgccagagcggattgttcggttatagcctctatattctgttattcattattgccactctctttctgttaccaggaagcatactggtgatcgctggaggaatagtttttggcccgctcttagggacactactctcattaattgccgccacgctcgcctcctcgtgctcattcctgctggcgcgctggctgggacgtgatttactgctgaaatacgttggtcatagccatacctttcaggccattgaaaaaggcattgcgcgtaacggtattgattttcttattctgacccgcttaatcccgttgtttccttacaatattcaaaattacgcttacggattaaccacaatcaccttctggccttatacccttatttcggcactcacgaccctgcccggtattgttatttataccgtgatggcaagcgatctcgccaatgaaggcattacgctgcgctttattttacaactctgtctggcgggcctggcgctgtttattctcgtccagctcgcaaaactctacgcccgacacaaacatgtggatctgtctgcttcgcgccgcagcccacttactcacccaaaaaatgaaggatagaacgatgtcgcaacattattcagtgtcatggaaaaaaggactggctgcactctgcttactggctgttgccgggcttagcggctgcgatcaaaaagagaatgcggcggcaaaagtggaatacgacggactttcgaacagccaaccgctgcgtgtcgatgccaataaccatacggtaaccatgctggtgcaaattaatggtcgtttcctcaccgatgacactcgtcacggtattgtgtttaaagatggctccaacggacataaatcgctgtttatgggttatgcaaccccgaaagcattttatgaagccctgaaagaggcaggtggtacgccgggcgaaaacatgacgatggataataaagaaacgactcatgtcacaggtagcaaactggatatttcggtcaactggcaaggggcggcaaaagcgtattccttcgatgaagtgattgttgacagtaatggcaagaaactggacatgcgctttggcggtaatttaacggcagcagaagagaagaaaacgggttgcctggtgtgtctggatagctgcccggtcggcatcgtcagcaatgcaacatacacttatggtgcggtggaaaaacgcggcgaagtgaaattcaaaggcaatgcctcagttctcccggcggataacacgctggcaacggttacctttaaaatcaccgaataaagcaggataaaggatgatgaagatgcaatcgcgtaaaatctggtactaccgtataaccctcatcatcctgttgttcgctatgctgctggcatgggcgctgcttcccggcgtccatgagtttatcaatcgcagcgttgcggcgtttgccgccgtggaccaacagggtatagaacactttattcagtcatacggcgcactggcggcagttgtctcgttcttgttgatgattttacaggccattgctgcaccgctacctgcgtttttgatcacctttgccaatgcgtcgctatttggcgcgttctggggcggcttgctgtcgtggaccagttcgatggccggcgcggcgctgtgcttttttatcgccagagtgatgggccgcgaagtggtggaaaaattaaccggcaaaaccgtacttgacagtatggacggctttttcactcgctacggcaaacacaccatcctggtctgtcggttattgccttttgtccctttcgatccaatcagctatgctgccggtttgacttcaatacgttttcgctcgttttttatcgccaccgggcttggtcagttacccgcgaccatcgtctactcctgggcgggtagcatgttaacgggcggcactttctggtttgtcaccgggctgtttattctgtttgccctgaccgtggtgatttttatggcgaagaaaatatggcttgagcgccagaagaggaatgcctgatgggtttaccgccgcttagcaaaattcctttcattttacgtccgcaggcgtggctgcatcgtcgccattacggcgaggtgctaagccccattcgctggtgggggcggatcccgtttatcttttatctggtgtcgatgtttgttggctggctggagcgcaaacgctcaccgctcgatccggtagtgcgatcgcttgtcagcgcgcgtatcgcgcaaatgtgcctgtgtgagttttgcgtggatatcaccagtatgaaagtcgccgagcgcaccggcagcaccgataaattgctggcggtagctgactggcgacaaagcccgctctttagcgatgaagaacggctggcgctggagtacgccgaagccgcaagcgttacgccgccaacggtcgatgatgccctgcgcacccgactggctgcgcattttgacgctcaggcgctcaccgaactgacggcattgatcggcctgcaaaacctgtcagcccgttttaattctgccatggacattcccgctcaggggctgtgccgtattccggaaaaacgttcttaaggagagatgatgcgccattgtgggtggttgctgggattgttatcgctgttttctctggcaacacatgccagtgactggcaggaaattaaaaatgaggccaaagggcaaaccgtctggtttaacgcctggggcggcgataccgcaattaaccgctatctcgactgggttagcggcgagatgaaaacccattacgctataaacctgaagattgtccgtctggcggatgccgcagacgcggtgaagcgcattcagaccgaagctgctgccggacgtaaaacgggcggctcggtggatctgctctgggtgaacggcgaaaacttccgcaccttaaaagaggccaagttattacaaacgggctgggcggagactctgcccaactggcgctatgtcgacacacagctgccggtgcaggaagatttttcagtgcctacagaaggggctgaatcgccctgggggggcgcacaactgacatttatcgcccgccgcgatgttacgccacagccaccacaaacgccgcaagccttactggagtttgctaaagtcaatcccggcacggttacctatccgcgcccaccggactttaccggcacggcgtttcttgaacagttgctgattatgctgacgcccgatcccgccgcattaaaagaagcgccggacgatgcgactttcgcccgtgtcactgctcccttgtggcaatatcttgatgcgctgcatccgtatttgtggcgcgaaggaaaggatttcccgccttcgcccgcgcggatggatgctctgctgaaagccggcacattgcgcctgtcgctgacctttaaccctgctcatgcccagcaaaaaatcgccagcggcgatttgcctgcaagcagttacagttttggttttaacgaggggatgattggcaacgtgcatttcgtcaccattcctgctaacgcgaatgccagtgctgcggcgaaggtggttgccaatttcctgctctcacccgatgcgcaactgcgtaaagcagatcccgctgtctggggcgatccttctgttctcgatccgcaaaaactgcctgacgagcagcgcgaaatattgcaatcaagaatgccgcaggatctgccgccggtactggctgaaccgcacgcaggatgggtgaatgcactggaacaagaatggttacgccgttacggtacgcattaatctttttgctgtgggcgatggtggcggtgatttatgcaccgctgatcccggcagctctcacgctgatatcgcctgcgttgtcgttgacacactggcaggcgttatttgccgatccacagttaccgcatgcattactggcaacgctggtgtcgacaaccatcgcggcggtcggggcattgttgattgccctgctggtgattgtggcgctatggcctgggccgaaatggcagcgtatgtgcgcccgtcggccgtggctgctcgccattccccatgtggcttttgccaccagcgccctgctgctctttgctgacggagggctgctatatgactatttcccgtatttcactccgccaatggaccgatttggcatcggtctgggcctcacccttgcagtgaaagaaagcgcatttctgctgtggatcttagcggcagtattgagcgaaaaacggctgttgcagcaggtcattgtgctggattcgctgggctacagccgctggcaatgcctgaactggctgctgttgccctccgtcgcgcctgcgctggcaatggcgatgctggcgattgttgcctggtcgctttcggtcgtggatgtggcgattattcttgggccaggtaatccaccgacgctggcagtaattagctggcagtggttaactcagggcgacgcggatcaacaaacgaaaggcgcactcgccagtctgctgctgatgctgttactcgccgcctacgttttgctgagctatctgctatggcgcagctggcggcgtactattccccgcgtagatggcgttcgtaagcctgccacacctttattaccaggcactacgctggcgagttttttacccttaaccggtgtgctgtgtgtggttctgctggcgatcctcgcggatcagtcgacgatcaatagtgaagcactcatcaacagtctgacaatggggctggtagcaacattcatcgctttgctcctgttactgcagtggctggaatgggggccacagcgtcgccagttgtggctatggttgcccattctattgcccgctctgccactggtggcgggccagtacacgctggcgctatggctgaacctggatagaagctggacggcggtggtctgggggcatctgctgtgggtaatgccgtggatgctgtttatcctgcaacccgcctggcagcgcattgattcacggttaattttgattgcgcaaacactgagctggtcgcgggccaaaatcttcttttacgtgaaatgtccgcttatgctacgccctacgctgattgccttcgcggtgggattttcagtcagtattgcgcagtatatgccgacgctgtggctgggcgcggggcgttttccgacgctcaccactgaggcggtggcattaagcagcggcggcagcaatggtattttcgccgcccaggctttatggcaactgctattaccgcttattatttttgccctgaccgcgttagtcgcaaaatgggtaggttatgtcagacaaggactccgctaatgctctgcgtgaaaaatgtttcgctacgtttaccagaaagccgcttgctgacaaacgttaactttacggtggataaaggtgacattgtcacgttaatggggccgtctggctgtggaaaatccactctgttttcatggatgattggtgcactggctggacagttttcttgtacaggtgagctatggctcaatgagcaacggattgacatgctacccaccgcacagcgtcagattggcattcttttccaggatgcactgttatttgaccagttcagcgtcgggcaaaatttactgctggcgctaccgtcgacgctcaaggggactgccaggcgcaatgccgtgaaagacgcgcttgatcgagcgggactggctgaaacttatcaccaggaccctgcgacattatcaggcggtcagcgagcgcgggtggccctgctgcgcgcccttctcgctcagccaaaagcgttactcctggatgagccattcagccgtcttgatgtggctctgcgcgataattttcgccagtgggtgttcagcgaagttcgcgaactggcgatccccgtcgttcaggtaacgcacgatctccaggatgttcctgctgatagttctgttctggatatggagcagtggtcagaaaattacaacaaactgcgataacgcaaagtttttctcaatgcgtcagttcagaatggcgcactcaaaactacaatgtcgggattttcgatgaaacgtgtttctcaaatgaccgcgctggcaatggctttagggctggcttgcgcttcttcgtgggccgctgaactggcgaagcctcttacacttgaccagcttcaacaacaaaatggcaaagcgatagatactcgccccagcgcgttttataacggctggccacaaaccttaaatggcccttctggtcatgaacctgccgccttaaacctctctgccagctggctcgacaaaatgagcaccgaacagctcaacgcgtggatcaagcaacataacctgaaagccgatgccctggtggcgctgtacggtaatgacaaagatgtcgacgccgtcaaaacgcgactgcaaaaagcaggttttacgcatatctccattctgagtgacgcgctaagcgaaccttcccgtctacaaaaactgccgcactttgagcagctggtttatccgcaatggctgcacgacctgcaacaaggtaaagaggttacggcgaaacctgccggtgactggaaagtcattgaagcggcctggggcgctcctaagctttaccttatcagccatattcccggtgctgactacatcgataccaacgaagtggaaagcgaaccgctgtggaacaaagtttctgatgaacaactaaaagcgatgctggcaaaacacggcattcgccatgacaccacggtcattctgtacgggcgtgacgtatacgctggagcgcgtgtggcgcaaattatgctctacgcaggcgtgaaagatgtgcgtctgctggatggcggctggcaaacctggtccgacgcgggactgcctgttgagcgaggaacgccaccgaaagtgaaagcggaaccggatttcggcgtgaagatcccggcacaaccgcagttgatgctcgatatggaacaggcccgtggactgctgcatcgccaggatgcatcgctggtgagcattcgttcgtggccagaatttatcggtacgaccagcggttacagctatattaaaccaaaaggtgaaatagccggagcacgttggggacacgctggtagcgactcgacgcatatggaagattttcataacccggatggcaccatgcgcagcgccgatgatattaccgctatgtggaaagcgtggaatatcaaaccagagcagcaagtttcattctactgcggcaccggctggcgcgcgtccgaaacctttatgtacgcacgcgccatgggttggaagaatgtttccgtgtatgacggcggctggtacgaatggagcagcgatccaaaaaatccggtagcaaccggtgaacgcggcccggacagtagcaaataacattgcaattactgacgctggtgcgacttcagcgtcagatacccactccacacccgcgtaaaggtcgtcatccagcacaacgcaccgaagatccacgcaaaccacgcaaaccatgcagggaataaacatcccagcacaaacagtaagatcgtttctgtgccttcggttaacccgcccagataataaaacgatttatgcgcataaccgggattatcaatctgatgtttcgccgccagcgcagcaaaagcgagaaaactgctgcctgtgccgataaacgcaaacagcagccagccgcctgccagggcgttttgctgcggtgcggcgaggataaacccaaaaggtaccagcgcgtaaaaaagaaaatcgagagaaatatcaagaaagccgcccgcgtcggtaagccctctgcgccgcgccagcgcaccgtccagaccatcaagcagcctgttcaacaaaatgacgacaagcgccgccagataccagcccagcgccagaaaaggcagtgccagcacgccgatggcaaatcccactaatgttaaaccatctggcgtaatgcccggtttatcaagaacccgcacgcactgatgcaacaacggtttaatccggggatgaagatggcggtctagcacaggcactccttaaatataaagcctttctgattgagcaacagtgcggatattatggcatttttcgcttatctgcccgtgtgtaatttatgaaaatgattgaagttgttgccgccatcattgaacgtgatggcaaaattttactcgcgcaacgccccgcccagagcgatcaggcgggattatgggagtttgccggtggtaaagtcgagccggatgaaagccagcggcaggcgctggtgcgtgagttacgcgaagaactgggcatcgaagcaactgtgggtgagtatgttaccagccatcagcgagaagtttcgggccggattatccatcttcatgcctggcacgtacccgacttccacgggacgttacaggcacatgaacatcaggcgctggtctggtgctcacctgaagaggcgctgcaatatccgctggcccctgctgacattccattattagaggcgtttatggctttacgcgccgccagaccagcggattagtgctaagggttttgtcatcccgctggcattgcagcagtattccctcggctttaattaccgcgccttcagaataatttttatcctgataaacgcagcactgagtacagggctgcgctgactgcccgcctgaactgaacacttctggcggtacgtttacctccacgtccggacgataatgcgggttagccagtgcaattaatggaaatgctaatactacggcgaacaatgctcgactcacagggaactccttaacgttattgtctctgctactgataacggtagccgggtggcaaaactttagcgtctgagttatcgcatttggttatgagattactctcgttattaatttgctttcctgggtcatttttttcttgcttaccgtcacattcttgatggtatagtcgaaaactgcaaaagcacatcacataaacaacataagcacaatcgtattaatatataagggttttatatctatggatcagacatattctctggagtcattcctcaaccatgtccaaaagcgcgacccgaatcaaaccgagttcgcgcaagccgttcgtgaagtaatgaccacactctggccttttcttgaacaaaatccaaaatatcgccagatgtcattactggagcgtctggttgaaccggagcgcgtgatccagtttcgcgtggtatgggttgatgatcgcaatcaggtacaggtcaaccgtgcatggcgtgtgcagttcagctctgccatcggcccgtacaaaggcggtatgcgcttccatccgtcagttaacctctccattctcaaattcctcggcttcgaacaaaccttcaaaaatgccctgactaccctgccgatgggcggtggtaaaggcggtagcgattttgacccgaaaggtaaaagcgaaggcgaagtgatgcgtttctgccaggcgctgatgaccgagctttatcgtcatctgggcgcggataccgacgttccggcaggtgatatcggcgttggtggtcgtgaagtcggctttatggcggggatgatgaaaaagctctccaacaataccgcctgcgtcttcaccggtaagggcctttcatttggcggtagtcttattcgcccggaagctaccggctacggtctggtttatttcacagaagcaatgttaaaacgccacggtatgggttttgaagggatgcgcgtttccgtttctggctccggcaacgtcgcccagtacgctatcgaaaaagcgatggaatttggtgctcgtgtgatcactgcgtcagactccagcggcactgtagttgatgaaagcggattcacgaaagagaaactggcacgtcttatcgaaatcaaagccagccgcgatggtcgagtggcagattacgccaaagaatttggtctggtctatctcgaaggccaacagccgtggtctgtaccggttgatatcgccctgccttgcgccacccagaacgaactggatgttgacgccgcgcatcagcttatcgccaatggcgttaaagccgtcgccgaaggggcaaatatgccgaccaccatcgaagcgactgaactgttccagcaggcaggcgtactgtttgcaccgggtaaagcggctaatgctggcggtgtagcaacgtcaggccttgaaatggcgcaaaacgctgcgcgcctgggctggaaagccgagaaagttgacgcacgtttgcatcacatcatgctggatatccaccatgcctgtgttgagcatggtggtgaaggtgagcaaaccaactacgtgcagggcgcgaacattgccggttttgtgaaggttgccgatgcgatgctggcgcagggtgtgatttaagttgtaaatgcctgatggcgctacgcttatcaggcctacaaatgggcacaattcattgcagttacgctctaatgtaggccgggcaagcgcagcgcccccggcaaaatttcaggcgtttatgagtatttaacggatgatgctccccagggaacatttcttatgggccaacggcatttcttactgtagtgctcccaaaactgcttgtcgtaacgataacacgcttcaagttcagcatccgttaactttctgcgatagcagcagatatgccagtaaagaaatcccattagactatttttttgataatcttcttcgctttcgaacaactcgtgcgcctttcgagaagcaagcattatataatgccaggccagttcttcttcaattgtcccgttttgaaaagctgtgcttgatatcgagatcatccatgataattccgccgcccatattagcttcgccgaggatttaccggagcgattattagcgcaatcagagatatagtctgagggaaaaacagcaaatttattcaacaaggcgataacctgctctggggcttcctccatgtttgctttaaaggtattggctccatggtcgccagaaagaaaatgctccattaaggcacaataactttcgctatcttcgataccccattgatcctctaaagactcgcgtcttttacttatgatatcgatcgagtcaaaaggaagcacatgatattggaaggtatctttgccaggttcaggctttcgcggccagaactccagcgtttcagaccattgcttatgatagaatcgataaggtgcgatcaattgtagcgcctgtaacttctcgatactgagcggctcaatacctttagcctgataataatgcagttgttctttttttgctttaaaaccggcccgaacaataagccccatcataattaatagataaagaaaagagcatcccgcggtaatcaggcctctttcattcaaaccgttggatgttatcgctgcgaacacaaacattacagcgacaacacatgttaaataaaacccccacttacaaagcagcatggccttattttctttaatcatccgttcaaaattactattaaatatttcccagccattaaaagaatacttctcgctcccaggatggttttgtaataaaacttttttcatcacattccctgttattacatactttagaggcgataattttatccatgcaaaaaaaatatccaacgaattttcttgatccgctggatatttcagaatatgactcgaatagcacgaaagattcactcgcttacgctatcgccccgcttccgacttcatctgctggcggactttttttcgcactacgtttacgcggtgcagcctttttcttatcagcactgccaccactgcccggagccacaatgccgcgaaactgccgcaccggcgtacgtttggcttgatcaataagctgatatagcgtccccaccagcggctgcataaagtcctgatagcgacactgcttttcgctgatttgcgtcagcaccgattcccagtgcgcggtcatgtccggtcgcgtcgccatttctggcagcgaatggaataacgcttttccggcgtcggtggagtggatataacgcccttttttggtcagaaaaccacgcttgaacagcagttcaataatcccggcacgggttgcttctgtccccagaccatcggtcgcacgaaggatctttttcagatctttgtcctgcacaaagcgcgcgatcccggtcatcgccgaaagcagtgttgcatcggtaaaatggcgcggcggctgggtttgccgctctaccacttcacctttttcacacagcaactcatcgcctttcgccaccacaggcaatggcgtgccgtcgttttcttcatcgcgctctttgctgcctaacagcgtacgccagcctgcttcagcaagaaaacgggctttagcgacaaatttgcctttggcaatgtccagttcgataacacacttgcggaacaccgcatccgggcagaactgcatcaggtattgacgggcaatcaggttatagaccttcgcttcgttctccgtcaggttgatcgcagaactccgtgcggtcgggatgatggcatggtgcgcatcgacctttttgtcatcccaacagcggttgcgtatatctggatctaccattggctgcggcaacagatctggtgcatgaacgctgatggcattcatcaccgcgtggcgtccggcaaaatgttcttctggcaaatagcgacaatcggaacgcggataagtgattagcttgtgcgtttcgtacagcttctggcagatatcaagcacgttctgcgcgctcagaccgaagcgttttgccgcttcaatctgcaacgccgaaagcgaaaaaggcagcggcgcggattctgattcccgtttatcgttatagctggtgacaatagccggttgaccactaatgcggttaaccacatgctccgccagtggacgatgtaacaagcgcccttcttcatcctggtacggttcacacgcttcgctcggttgccagatagcggtaaaccgctcatcggcaggtgtcacgatatgcgctttgacttcaaagaagtctttcgccacgaagttttcaatctcttcatcgcggcgcaccaccagcccgagcacgggtgtctgcacgcgtcccacggaaagtacgccctgataaccggcattgcgaccaagaatggtatacgcacgggtcatattgatgccgtacagccagtcggcacgcgctcgcgccagcgcagaaacgcacaatggcacaaactcactgttggaacgaagacggtcgatcgcccgctcaaccgcctgcgggttcaggtcgtttatcaagcaacgctgcacctgctggcgcttttccggtgccagttgcagatagtccagcacttcatccaccagcaattgcccttcacgatccgggtccccggcgtgaacgatttcgctggcttcatgcaggaagcgtttgatgacgttaagttgtttggtcacggagggtcggggctgtaattgccacttttccgggacaatcggcaaatccgcaagattccagcgcgcatagcggctgtcgtaggcgtctggctgcgcctgctcaagcaggtgaccgatacaccaggtcaccacctgaccattaccgcactcgataaagccatcgcctttacggtgcggtttgggcaggacatcagcaatggcgcgcgccagactcggtttttcggcaataaacaaccgcattgaattaacggatctcaaccatggcacgaccgccgcgcgctggcaccagttcgccaatcgccgtcagttcaatgccaaactcggcggctgtagttttaacctcattttctgcttccggcatgaccgccagcagcaaaccgccagaagtttgcggatcgcacagcagatcgcgcacttcacgcggcatttcacccatcagatgaccgtagctggcaaagttacgttcggtgccgccaggcactgcgcccaacttaatgtactcttcaaccccggcaattttgggatcgcgtcatagtcaacgcgcgcctgcacacctgcgccctgacacatttcgctcaaatggcccagcagaccaaaaccagtaacgtcggtcatcgcttttacgccttcgatgttggcaaaggacgcacctgcgatgttcatccggcacatcacttccgtcgccagtccctgatgttctggtttcaacagtgattttttctcagccgtggtaagaacgccgatccccagcggtttcgtcaggaacagtttgcatccggcttgtgcggtactgtttttcttcacccgctcggtcggtacgatccccgttaccgccagaccaaaaatcggctccggcgcatcgatggagtgaccgccagccagcgcaatacccgcctgacggcatgcatagcgtccaccttcggttacttcgcgggcaatttccggggaaagtttgttaatcggccagccgaggatcgcaatcgccataatcggtttgccccccatcgcgaagatatcgctgatggcgttagtcgccgcaatgcggccaaaatcgaaaggattatcaacgatcggcataaagaagtcggtggtactgataacgctggtgccattgcccagatcgtacaccgccgcatcgtcgcgggtctcattacccacaagcaaattcggatcaacaaacttcgcctgctcactgtgcaggatggtttccaacacttttggggaaattttacagccgcaaccagctccgtggctgtattgggtcaaacgaatcgagttctcgctcatggacatctcctgtcaatgcaatccgggtatggtaaccctcattccgtgaagtgataagtgagagtgtctgaattcctgcgcctttgctcacaatccagacagtttcgcgacaattatcagaaataagttacaaacggcgtcgggtccgggacgttaatcgacgtagatgctttcaactgcggcgtgccgaggtagagaaaaccgacaattttatcctgctcacggcaaccgaatgcttcacgcactaccggactttcagttaatgcgccactgcgccagatgccgccaaatccttgggcaacggctgccatttgcatcgccatgaccgcgcatccggcagacatttcctgttcccatcgcgggactttatgattttcttcgcatttcgccaccaccgtgatgatgagcggtgcgcggaacggcgcattacgggctttgtcgatagctttgtcatcactaccggcagcaatcgccccctgttccagtacggcgctgaaacgctcgcgcccttccccttcaatcacaaaaaaatgccacggttgcatggacttatgatccggcgcacgcatacccgcacgcaggatgttttgcagttgttcacccgttggcgcgggttcagccaggcgggaggcgctacggcgattgatcaatagttcgagtgcatccatttgattaactcctgtcgtgatatttattcacaaaattaacacgagagtggattttgttacagcacagtccgcaattcctgctgacaagtgccggttgggtcattacgataaccacatctattgcgcctgtgacaggtgtgaccttaagttgggagaatacatgcgaaccctttggcgatttattgccggattttttaaatggacgtggcgtctgctgaatttcgtccgtgaaatggtacttaacctgttctttattttcctcgtactggttggtgtggggatctggatgcaggtcagtggtggtgattcgaaagaaacggccagtcgtggcgcactgctgctggacatttctggtgtgatcgtcgataaacccgacagttctcagcggtttagtaaattaagccgccagctgcttggtgccagttccgatcgtctgcaggaaaactcactgtttgatatcgtcaacaccattcgccaggcgaaggacgaccgcaatatcaccggtatcgtgatggatctgaaaaacttcgcaggcggcgaccagccgtctatgcagtacatcggcaaagccctgaaagagtttcgtgacagcgggaaaccggtttatgccgttggcgagaactacagccaggggcaatattatctcgccagtttcgccaataaaatttggctgtcaccgcaaggcgtggttgatctgcacggttttgctaccaacggtctgtactacaaatcgttgctggataagctgaaagtttccacccatgtgttccgcgtgggtacgtataaatctgccgttgaaccgtttattcgtgatgatatgtcaccggcagcgcgcgaagctgacagccgctggattggtgagctgtggcaaaactatctgaatactgttgccgctaaccggctgatccctgctcagcaggtattccctggcgcgcaagggttgcttgtgggtttaaccaaaaccggtggcgataccgcgaaatatgcactggaaaacaagctggtcgatgcactggcatcgagtgccgaaatcgaaaaagctctgaccaaagagttcggctggagtaagactgataaaaattatcgcgccatcagttattacgattacgcattgaaaacgccggcagataccggtgacagcatcggtgtcgtcttcgctaatggcgcaattatggatggcgaggaaactcaggggaatgttggcggtgataccactgcggcacaaatccgcgacgctcgccttgacccgaaagtgaaagcgattgtcctgcgtgttaatagcccaggcggcagcgttaccgcgtctgaagtgattcgcgctgaactggcagcagcccgggcagcgggtaagcctgtggttgtatcgatgggcggcatggcggcatctggtggttactggatttccacgccagctaattacattgtggctaaccccagcaccctgaccggttctatcggtatcttcggcgtgatcaccaccgtagaaaatagtctggattcgattggtgttcatactgatggtgtctcaacttcaccgctggcggatgtttctatcaccagggcactgccgccggaagcgcagcagatgatgcaattaagcattgagaatggctataaacgctttatcacgctggttgctgatgcgcgtcattcgacgccggagcaaattgataaaatcgcccagggccacgtctggaccggtcaggatgcaaaagctaacgggctggtcgatagtctcggggatttcgatgatgcggttgccaaagcagcagagctggcaaaagtgaaacagtggcatctggaatactacgttgatgaaccgaccttcttcgacaaagtgatggacaacatgtctggttctgtccgggcaatgttgccagatgcgttccaggccatgttacctgcaccgcttgcctcggtagcctctaccgttaaaagtgaaagcgacaagctggccgcgtttaacgacccacaaaaccgttatgcgttttgcctgacctgcgccaacgtgcgttaagtcttgtactgagtggccgacagatcgtcggccacattattttttacctcgacgaatcctcttcccgctgtctcgccccatatttccttatccgcatagtatcaggtgcgctcctcctgcctcacgtatatacttttgctctttcgatatcattcatatcaatatcatgcaaaagaaatcaatttacgtcgcctacacgggcgggaccatcgggatgcagcgttccgagcagggttatattccggtgtcaggtcatctacaacgccaactggcgctgatgccggaattccatcgcccggagatgccagatttcaccattcatgaatatacgccgttgatggattcttctgatatgacgccggaagactggcagcatattgctgaagatattaaagcgcactatgacgactatgatggttttgtcattctacacggtaccgacacgatggcgtataccgcctctgcgctgtcgttcatgctcgagaatctcggtaaaccggtcattgtgacagggtcacaaatcccgctggctgagttacgctctgacggacaaattaatctgctgaatgcgttgtacgttgcggcgaattatccgatcaacgaagtaacgctctttttcaataaccgattgtatcgcggcaaccgcactaccaaagcccatgccgatggttttgatgcgtttgcctctcctaaccttcctccgttactggaagcaggtatccatattcgtcgtttgaatacgccacccgccccgcacggtgaaggggaattaatcgttcatccaatcaccccacaaccaattggcgtagtgacgatttatccggggatttctgctgacgtcgtgcgcaattttctgcgccaaccggtgaaagcattgattctgcgctcctatggcgtgggtaatgcgccacaaaacaaagccttcctgcaggaattacaagaagccagcgatcgcggtattgtggtggtcaacctgacacaatgtatgtccggtaaagtgaatatgggtggttatgccaccggtaacgccctcgcccatgccggcgttattggcggtgcagatatgactgtagaagccacgctaaccaaactgcattacctgctgagccaggaactggatactgaaaccattcgcaaggccatgagccaaaacctgcgcggcgaactgacgccggatgattaaggagactgcaatgccccatcgcgccctgttactggtcgatttacaaaatgatttctgtgctggtggcgcgctcgccgtaccggaaggtgacagtacggtggaggttgctaaccgccttattgactggtgccagtcgcgcggagaagcggttatcgccagtcaggactggcacccggcgaatcacggcagttttgccagtcagcacggtgtagagccttatacgccaggccaactcgacggtttgccacaaaccttctggccagatcactgtgtgcagaacagtgaaggcgcacaattacatccgttactgaaccaaaaagcgatcgcagcggtgttccataaaggcgaaaatcctttagttgacagttacagtgccttttttgataacggccgtcggcagaaaacctctctcgatgactggttacgcgatcatgaaatcgatgaattgatcgttatgggcctggctactgactattgcgtgaagtttaccgtgctggacgcgttacagttaggttataaggtgaacgtgattaccgatggttgtcgtggcgtgaatatccagccccaggacagtgcacacgcgtttatggagatgtcagcagctggggcaacgctatatacgctggcagactgggaagagacacaggggtaattttacgctggcctacaattctgtactggcattgtaggccaaataaaacacgtcagtggtacatctggcaattgatgccatcaacgaaagatttaattcacctcagaaatctcttccagcgacaccttccgcgtttcgatgccaaaaatggagagaaccagcgcacagagcactaacatgacaccaagcaccataaacaccgtgatcgacccataatgtgttaataatgccgcaacgccatagggcgtgaaaactgcgacgatccgtccgacggcattaacgaaacccgaaccgcgcaggcgtaaatgcgttggccaaagctccgggatataaaccgctgacgcgaagcaaacatacatgtataaaaagaagatcatcaccagaccatagattaaaatcgcccactctgtagtctgaattgaatagatatagcctaacacggcaataataataagtaaggcggagccaaataatcgacgaggaaaatgatcaataattaatgccgcaataaatattcctaccggagcaccaatcataataacagcggtcattaatattgatttatcgacatcaatcccggagttaacaaatatggtcggtatccatacggtaatggtataaagcgaaatgttcattgcaattaaaacagttatcgcaactaatgtacgtcgtaacatttcccctttaaacaggagccagaaggtacccttgattaccttaaccttgctgttgctctggttcaaagtaagctggggtaaacgaatactcttctccctttcaatttgctgctctacttcacgaagttggctttctgcaccggcgatttgccctttccctgccagccatcgtggcgactcgataaagtatttacctgagagaaaccaggctaacagtatgccaataccacccagaagaaacattattcgccaactaaaaaaagcgataaccaccacgcctatcgccgcagacagcatgggcgaccagttaccaacaaatgagagccgcgcggaccattttccacgcaccgtcgcggggataaactccgtaaatgaggcatagccaaccataatcagcgcccccattcctgttcccatcaggaagcgaaagaaaatgagccagtacatatcagggacaaaagcggcccctgttgcagcaataccgacgatgagaagatttatgcgaaacgccctgcgccgcccaaagtagtcaccaataaacccaccagtaagtgagccgatgaaataaccaaacattaatgccgaggtaaaggcggcattgaggaaattatttgaccatccattgcttaccagctttgctaagacgacattacctgagtaactcaaaaaccccgttaataacagactaaagcttattataccaaatatacgataatgaaaccgggccaaaggcaagcggtccagtcttgcgccaatttgatcatattgttccattaggtgcctcggatttgctaaaaaggtagcaattgcggcaaattcacttgccgcatctttatcatcattttatttcaaggcgcaggaacaaataatattgacaacgtgtgcttaaattaccacaccagctggatattattgtctttgcaaaatgctatccactctgcacccggtgatttatcagttattatgtaattaatatgactaaaatcagctaactggacaaaagctttgcgatcaaacttagagtgatcaaccaataacgcaacttctgtcgcctgacggatcattgtctttttgatttcagcttccgcttcattagagtccagcgcgccgctgttaatatcaagacctttacaactcattaccatgatatcgacatgatagcggctgatgatctctttagtaattcttccttgcagtgaaagtgtatttttgtttagttccccacccgttgaaacgactttaatttctgactgagccagaacatgaatcgcttccgccgagttggttagcaacgtcaggtcactacggtcctgtaacaatttgagcaattccattacggtactactggaatcggctgccatggtggttttattgtcgataaagggtagtgccttgcgtgcaataagctgcttctcttcataaaacgatgaagcgcgcttataaaaatggatattctccgtcaacatcgctgtatttaaaacagcaccaccataggttctggtcaaaaagccttcatcttccagcttctcaagatcgcggcgaatggtttcttcggttacctgaaaaatcccactcaaatttgagactgtcacttttttatcgttggcaaccatttgcttaattgcctgaatcctgtcttttgccgccacgattacacccctgtatctttttacatcacattagcgcgattatcgcataaccgatgtttactttcaaaataacctgtttgaatcacagattttcatcacagttttcacagaaacagaggtgaatcgtgttgagtatttaacgctccagggcctctgccatttccctcatcaatgttgcgtctgcatccgataagttgatattcagtgccgcgacattttcgcgtacctgttccggtgcagtagccccactaagaatggagattaaatcactctgttttaatatccacgccagtgccagagtgggaattgtgcactgataacgagcacaaagtggctgccactgttcaagcatatcaatcactttcagcatgttttcacgctggaaccagactttatttgcccgagcgccgcccggaacgtaatcacgagtgatggtgccggtcaacaatccctgctctagcggggaataaacctgaaccacaatgccattatcacgacatagtggcagcagttcgttttccattgcccggtcgaggatactgtatttcgcctgaataatatccagttcaccatattgcagatactcgcggatatggtcagcatcgacgttagcagcgcctatagcgcgaattttcccttcagactttaactcattaagcactgcgacagtttcagcgatcggcgtaaaaaatggcggcaccgactgccagtgcgtcatgtagatatcgatgtaatcaatacccagacgttgcaagctcgctgctacctcttcgcggatagattccggggaaaggtttttatacaactgccgatcgccaactttgttgaataaacttccttttcgttcccagacaatgccgcatttggtttctactacaacctgttcacggggcagtttttttaacgcctgaccgacgataacttcactattgccaaagttatatcctggcgcagtatcaatcagattaatgccacaacgatgggcttcaagaatagtatcaatacatatttgccgatcgagatcgccattccatgcaggaccgccgccaatggcccatgtccccaaccccattcgcgaaagcgtaatatccgttgtgcctaaaggtatctttttcatttgccttcattatccttcgtattcttccagcaattgttcgaccagctttctgttttttacgccggtggtggcaccgacgcttagaaccgagatagccgccgttgcattggcaaagcgtgcgcattcacgcagatttttgccttctaacagtgccgcaataaaacctgaagcaaagttatcgcccgcgccaatggtgtcgatggcggttattcctgcgaccgccggcaccttcatcgtcatgtcaccacgcttgataaagcagccgtctttacccgttttaatcaccaccgtttttacgccgcacgcaagaaagcagtcagcaatttcatccagtgtctctttcccggtgagtaattttgcctcggcaaaattaggaaacagataatcgacataactcaatgcttcgcaaatatcatccagcgtttcattcaaccgcggtttgatcatatcggcacagataatcatctgccgggctttagcttgcgtaaaaatttctgttagcgctttaccatccaatagtggactgttgaaaatactggccagtgataataatttcgcctgagaaaaccgcgcaaaatcaacatcgtcaatattcaatttccacagactgccattacggtttgtgacaaacgtccgctcgccatcctccgtcaccagtccaacgttaatagaggtatctatgctgacgtcctgcttcaggctttgaatatcaatattctctttgcggcaatggtcgagaataaattgccctgcggcatctttaccaatacgactcattaatgctgtgcgatggcccagacgagaaataattgttgcttcatttattgcatcacccccggtggtcattgcgattctttcaagaggataagaatccacatcaaagatatttttactgaccggttgcaatggaatatcaacaatagcggcacctatacaaataacgtcgagattatccatatcattattccgctttgccatcagaaccgaacagtttaattttttccaatgcccgttcttttacagctttacgtacttcacgttctaaatgcaggaaaggctgatcctggttttctttcactgcaaccattgcggcctgacagagctccgtatgaatgttgattttcgcgatacccaacgaaattgcagttttaatgtcggcatcactgatccccgatgcaccgtgcaaaaccagcggaacagaaacggcatcgcgtacgcgtttgacgacctcaaagttcaattgtggctctgacgtataaaccccatgctggttgccgatggcgacagccaatgaatcacagcccgtacgttcaacaaattcagccgcctggtcaggatcggtatagtgatagcccgccagcgcttcctcataaacggtttcattaccgacatgccctaattccgcctctaccggaatacccagcggatggaagaaatcgacagcctctttggttaaacgaatattttcttcgaaatcaaacgcggaagcatcacgcattaatgaattcataccatgagtccaggcgttatgaataatctccatactccgaccatgatcccaatgagttattaccggcaccgttgctttttgtgccattgataccatcatgtgagagaaatcttcaaatgaggtgttaccgacaaaacctgtaccaaaagaaataataaccggggatttcgcttcttcggctgcgtcgataacgcccatcaacatttctgcattccatacgttaaaatgggcaattgcataatgtttatttgtggcatcgttttcccaatatctgatatctgcgagcatgttctgttctcccgtattaattaatcgctaattttaataacgcctttaataatgtcgcgtttgttgttaactgactcttcaaatgcctgttgtacatcccgataatcgtaaatatgcgtcaccatcgatttcacatcgaatcgccctgaagaaatagcttcaatcgtgaccggataacgattggcatagcggaataccgtctggatagtgacttcgcgattgattttgaggaaattgattgccgaatcgccgggtacagtaccaacaatcataattttaccgccgcgcattaccagataaggtgcctgtttaacggtgaccgcagaacccgctgtttcgaaaacaatatctgcgcccatgtcttcggtaaattgctgacagcgtgcaatagtgtcttcttttgtgccgttaataaccactgtcgcaccaagttgttccgccattatcagacgtttttccagcacatcaacgacggcaatttccgttgcgcccaggcatttgcacgcttgcaacgtcatcaaaccaatacaacctgctcccagaataattatcttcttacccggtttaacatctgccagcatcgcggcatgcatcccgactgcggcaggctccaccagcgccccttccatcgtgtccatattgtctggcagtttgtaagtaaagctctccggatgacacagatagtgcgttaatgcgccgcggtagttgggttgtgtcgccataaaatcaacgtccgggcagatgttatatttgccttccagacagtaacgacagtgaccgcaaggaacgccaggttcgatatttacccgatcccccggtttaaatttgcgcacgcggcttcccacagccacaaccgtcccggcgcattcatgacccaggccaatttcttgatttgggtctttaggcggaataaacgggcctgattcaaaaccatgtacatctgaaccacaaataccgacatattctactttaatcaaaacttcatcttctttaggcactggtatttctgctgaaataattttcattgtgcccggcacctgcaatattgcttttgaatttttcattttgaatccacccgtattatttattggctactgcatcaatacttaaactttcaacggagacacctttggtttcaattccaatggtggcgatagcaattgcgacaacaattgaaacagcccccagaagaataaagactcccgttacgccataactactgagcagcactgcaacggcataaggtgcggcaataccactgattcgccctaccgcattcgccagaccggagccacggagtttggcctctgtcggccagatttcagggacatacactgccgaggcatagcaaacgtacatatagacgaaagtaatcaggaagaaaccaatcaacgttatgagcaacatactggtttgcagtgaatagatatatccgagcaccgcaatcaggattaatagccccacacccattgttttacgcggaattttatccatcaccagcatggcaataaaaataccaaatggcgcgccaaacatactcatggtatttaaaacaatcgagtcttttaaattaatcccctgggtcatgaatattgttggcaaccagttaattagtgtgtactgcacaacgttcatggcaatcagcacacaagagcctaatatcacgcgtttcagtaatactcctgtcagtaaggctgaatacggcaccgcttgtggcgctttaccgtcatcagcaataaccacaggcggcaaaggttttcccgtctggcgtatgacgccttcttctatactccgcatgactttctcggcttcttgataccgtccgcgcgattccagccagcgcggggattcaggaaagtagcgccaggccagcgccgtagcgataagcgacaatattgcagggataagcagttgtacccgccagttccactctgcactaatcagcggcgtgagtcccatcgcaatcaatgaacagagcggatatgaccagttgccaataaaggaaacccgactgggccacgttccgcgatttctaccgggcatatattcggtgaaaccagcaaacagtgtaaccagtaaagctcccagcccaacgcccatcacaaaacggcaggcaataagaaaatccatattcggtgagaaagcaccgacaaccatcgaggcaatatgaatggcctcatagaggatgaacgcatttctgcgaccggttttgtcgccaatgatgccgcccaccagcgcaccgagaaacattccggcggtcgtgattgctgagaatgtggctgtggtggaattatctgtccagcccaacgctttcagctgcgcgaggatcaagccaccaacggcattactccagcagacaagcaagccaaacgcgacgatggcaaacattgacgaatgccagcggcaatccggtaagcgatccagccgtgcaccacaatgcggttttgttatctgttccatgcgataacgttccttcaggagagtagttattcatcaaagtcgtaagtcatgatcactttgattgcggttttatcgaccatcgcatcaaacccttcgcgccattgcgacaggccgatacgatgcgtgatcatcggtttgactttgatagcgccgctggctaatagccggatagcgttacgccatgaggtggagtcataggccatatgcccaatgatgcttttattccaggcggtaatgtcattaatcgagaaatcaagaggtttgaagcccattccaacgcgtaccacttccccattcgggcggagcatttcgatggcttgtttcagtgcgatattggcaccggagcattcaatcaccagtcccagattatctttgccacaaatttgctggcagcgcgccaccacatcttcggtagaaccatttactactgccgtcgcccccagttcttttgcaaccgggaagcggaccgccacatcttcttgcagaccaacgacgacgatatttaccgcccccataatccgcgccatttgtacggaaaacagcccgagtgggccagtgccgatgacgacaacatcctgaccaggaaggaatttcgattgctgcgcgatggatttataggcattacagatagggtcaagtacggctgcgtcctcataatcaacaccatcagggatttcccacaacgcatgacgatgaattttgagaatttcaccaggaaccagacaatatttggaaaaaccaccgccccaggtattgttatccagaccaaggtttactttttctgtacaacacagaaaatcaccctgttcacaggccggacaaacgccgcaaacgtgaccgctgttatccgacacgacgcgttgccccactttccagtctttgactttttcaccaacctgcgcaatacaacctgcgaactcatggccgcggatagagttaaactcatcagaaccgctatcgacattgtagtgcttcatgtctgcgccgcagattgccgcggctttaatttcaatcactacgtcttccgggccacaaatgggttgtgggacatcaatcatcttgtagccgccaaaggccttgccaaaccgagccagtgctttcattgcgtcatcctctgtgttttgttttgcttagatggccatcatacttatccacatgatttttgaggtcaacattaaatctgtaaaacacagataacaatctgcgttttacaacttagatcacaattacgcagaaaatggctgggtctgttacaggttggtggaaggcgggacgcaaaaagagcaaattcgagagggattaccggccaaataggtctgagacttaagttcaggagaagtcattcaggcgtgaacgcgactgcaagagatcggactgggacttagccaggtcgggtcgagataattgagacgagtcgtggggtcattgttggctatccccttcatagccgcggcaaaaaggggataaaccacttacttaaacatagcaataggctttgctgagataccaaaatcttcttttaactgctgtttgctcttcatgaccatctgaccatttgtgtcaattgtcatatgctgtgcttcggtattatggcgggcttgccacagcatcaccagttgcaggcaattctctttttgttcctcggtcaacgcaacgccatcaggccatttccccagttcaacggcggtcgacaaacgctggtatacctcaggcgtcatgctgttgataatgtcatcaagattcataatttttccgctcctgtggaataagttgctgaatcgttttttcaaccgttgatttcttcgccgttttcgccatcggtaaagcgtaaagaggcagagttaacacaataacgttcgcccgttggctgcggcccgtcagggaagacatgccccagatgggcatcacagttaccgcaacgaatttctatgcgctgcattccatgtgacaagtctttgatataacgaatggattcttcactcaccggttcgtagaaactgggccaaccacagccggaatcatacttggtttgggaatgaaacagcggggcatcgcagatcaaacagtgatatacgccgtcacgcttgttatgcagtaaacgacccgtaaatggcggctctgtcccatgattctgcgtcacgtaaaactgcatctcggacaaattttttttcagttcttctgccgaaggtttattagccatttgctcacatctcactttaatcgtgctcacattacgtgactgattctaacaaaacattaacaccaactggcaaaattttgtcctaaacttgatctcgacgaaatggctgcacctaaatcgtgatgaaaatcacatttttatcgtaattgccctttaaaattcggggcgccgaccccatgtggtctcaagcccaaaggaagagtgaggcgagtcagtcgcgtaatgcttaggcacaggattgatttgtcgcaatgattgacacgattccgcttgacgctgcgtaaggtttttgtaattttacaggcaaccttttattcactaacaaatagctggtggaatatatgactatcaaagtaggtatcaacggttttggccgtatcggtcgcattgttttccgtgctgctcagaaacgttctgacatcgagatcgttgcaatcaacgacctgttagacgctgattacatggcatacatgctgaaatatgactccactcacggccgtttcgacggtaccgttgaagtgaaagacggtcatctgatcgttaacggtaaaaaaatccgtgttaccgctgaacgtgatccggctaacctgaaatgggacgaagttggtgttgacgttgtcgctgaagcaactggtctgttcctgactgacgaaactgctcgtaaacacatcaccgctggtgcgaagaaagtggttatgactggtccgtctaaagacaacactccgatgttcgttaaaggcgctaacttcgacaaatatgctggccaggacatcgtttccaacgcttcctgcaccaccaactgcctggctccgctggctaaagttatcaacgataacttcggcatcatcgaaggtctgatgaccaccgttcacgctactaccgctactcagaaaaccgttgatggcccgtctcacaaagactggcgcggcggccgcggcgcttcccagaacatcatcccgtcctctaccggtgctgctaaagctgtaggtaaagtactgccagaactgaatggcaaactgactggtatggcgttccgcgttccgaccccgaacgtatccgtagttgacctgaccgttcgtctggaaaaagctgcaacttacgagcagatcaaagctgccgttaaagctgctgctgaaggcgaaatgaaaggcgttctgggctacaccgaagatgacgtagtatctaccgatttcaacggcgaagtttgcacttccgtgttcgatgctaaagctggtatcgctctgaacgacaacttcgtgaaactggtatcctggtacgacaacgaaaccggttactccaacaaagttctggacctgatcgctcacatctccaaataagttgagatgacactgtgatctaaaaagagcgacttcggtcgctctttttttacctgataaaatgaagttaaaggactgcgtcatgattaagaaaatttttgcccttccggtcatcgaacaaatctcccctgtcctctcccgtcgtaaactggatgaactggacctcattgtggtcgatcatccccaggtaaaagcctcttttgcattacagggcgcacaccttctctcgtggaaacctgcgggtgaagaagaagttctgtggttgagcaacaacacaccgttcaaaaatggcgtcgctattcgcggtggcgtaccggtttgctggccgtggtttggtccggcggcacaacaaggtctgcctgcgcacggttttgcccgcaacctgccgtggacgctgaaatcacatcgtgaagatgctgatggcgtagcgctgacttttgaattgacgcaaagcgaagagacgaaaaaattctggccgcacgactttacgctgttagcgcatttccgcgtgggtaaaacctgtgaaatcgatcttgaatcacatggcgaatttgaaaccacctctgccctgcatacctactttaacgtgggtgatatcgctaaggtaagcgtcagtgggctgggcgatcgcttcattgataaagtaaatgacgcgaaagaagatgtactgaccgacggtattcagaccttccctgaccgtaccgatcgcgtgtatctgaatccgcaagattgcagcgtgattaatgatgaagcgctgaatcgtattatcgccgtaggccaccagcatcatctgaacgttgtcggctggaacccgggaccggcgctttcagttagcatgggcgacatgccggatgatggctacaaaacatttgtttgtgtagaaacggcttacgcttcagaaacgcaaaaagtgaccaaagagaaacctgcacatctggcgcaatccattcgcgttgcgaaacgttaatttgcgttaatgttgtgtgccgggtgcgatgcatccggcacgtatcaacatcacaccatatccagcgcagtttttccttttggtgccggatacgctttatccagcatggttaattccgctgacgaaagttcgacctcaagcacagccgcattctgttggacatgggcaatcgtggccgcttttggaatcgccatcacaccctgatggctgattacccacgccaacaatacttgtgccgcgctgatattgtgagcatgtgcaatttcgttgactaccgcgttttttaacagtccattgcgcaaccgcccggcctgggctaatggactgtaagccatcaccggcatctgctgttgctggcaccaggggagtagatcgtactcaatccctcgtgaaccgagatggtaaagcacctgattagtggcacactgatttcccccggcagctgccagagttcctgcatatcagcatgatcaaggttagaaacgccccagcggcggatttttccctgggcgatcaatttttccatcgctgccacagtctcttcaaaagcgaaactgccagaccagtgtaataagtagagatcgagataatcagtattgagacggcgtaaactggcttcgcatgcatttatcgctttttgcccgccagcattccacggatagactttagagacgagaaagacgttatcgcgcagaccggttaatgcttccccaaccaccttttcggcaccgccatcggcatacatttcggcggtatcaatgagggttaaaccgagctcaatgcccgcgcgtagtgcagcaacttctgttttgcgctgactggcatcttcgcccatataccatgttccctgccctatggctggcagtgagacatcgccactaaattgaatcattttttgttgcattgtttcctcccaggtattgcaccaccgtaatgcaaaacagggcgtgacgccctgtttttatgcacaaaatgccctggaaagatgcattatcagaatttgtaggtgatcccggtagaaatcaggccagtccaggatttatccaccatcgggctgtcagtaacttcatcagacagacgggtatagcgcgcggtaccgtaaacactccagtcgccgaggaagttgtagctggcgctcagctccaggtaagggctccagctgtcgttcgggttatagccacgcagaccgctgcgagcggactctttgcgcgatacgccataatagtattcgttctggttttcgctgttccactgcacaccaatacccggagtcacggtcaggccaccgttggtgtaacgatacaaccaggccatatcccagacaatgccgttgctgttatccagggtatcgccagccagggtggtacgcaggtaaccgtactgggtaaagtgagcataagacagaccagccatcatggtgctcttacggtcatccaggtgacgcatttggtgatcgccactgtctttcgctttgaagtaaagcggcgaccagtaagcggtaattgaaagtttatccgttgcgtcattccacaggtagtaaccaccacctaagccacggaaccagaagttatcgccttcatagttgattaccggtactgggtaaacatcggtatcgtaatctttatatgggtgttcaacgacacctacgcctgcgcccagggaaaatttaccttcagcgtgcgctacgcctgcagacgttgcgataagcactccaagtgccagaagtttgagtttggtcacaattaatcattccttaaacaaatgtttagcgggcgacaaagtttacccgtcaatacatcgaaacccaacctttttacgttttcattttttaaagtaactgtttaattttcctgacgcggatgacaccgcgcttacagccaaatgaatttagcgttactggctaccctggtctttacattaattatgcaaaatttatggatgagttgttgatatgccattgaaattaagaaagccgtgcaggcaagttttccatttgccatctacgcttaattttgaaggtgtatcaccgggcacgttgttctcatcgtcgataaaatggcatgagagttgctgtgttttagcaagagacgtcgttcagtttacctcttccgggagcctctactattcatatgaacggctcttaacctgtgctaaaaaacgaaaggacggcataccatgaatatattcgatcactatcgccagcgatatgaagctgccaaggacgaagagttcacactgcaggagtttcttaccacttgtcggcaagatcgcagtgcttatgccaacgcggctgagcggctattgatggctatcggtgagcctgtcatggtcgatacagcccaggaacccagactttctcgactcttttctaaccgggtcattgcacgttatccggcgtttgaagagttttacggcatggaagacgcgattgaacagattgtctcttatctgaaacacgcggctcaggggctggaagagaagaaacaaatcctgtatctgctggggcctgtgggtgggggtaaatcatcgcttgctgagcgactgaaatcattaatgcagctcgtaccaatttatgtattgagcgccaacggtgagcgtagcccggtcaacgatcatccgttctgtcttttcaatccgcaggaagatgctcagattctggaaaaagagtatggcattcctcgccgttatctcggcaccatcatgtcgccatgggcggcaaaacgcctgcatgaatttggtggcgatatcactaagttccgggtagtgaaggtctggccgtcaattctgcaacaaattgctatcgccaaaacggaacccggtgatgagaacaaccaggacatctccgcgctggttgggaaagtcgatattcgtaaactcgaacactacgcgcagaatgacccggacgcctacggctattccggtgcgctgtgccgcgccaaccaagggatcatggaatttgtcgagatgtttaaagcaccgataaaagtgctgcatccgctgttaaccgccactcaggaaggtaactacaacgggacggaaggtatctccgccctgccgttcaacgggattattctcgcccactcgaacgaatccgaatgggtcactttccgtaataacaaaaacaacgaagccttcctcgaccgtgtttacatcgtgaaggtgccgtattgcttacgcatttccgaagagatcaaaatctacgagaaattgcttaatcacagtgaattgactcacgccccctgcgcccctggcacgctggaaacgctgtcacgtttttccattctttcgcgccttaaagagccagaaaactccagcatttattcaaagatgcgggtttatgatggcgaaagtctgaaagacaccgatcccaaagccaagtcgtatcaggaatatcgtgactacgccggtgtcgatgaagggatgaacggtctgtcgacgcgttttgcgtttaagatcctctcccgcgtgttcaacttcgatcatgtagaagtggcggcaaacccggtccatctgttctacgtactggaacagcagatcgagcgcgagcagttcccacaagagcaggcagaacgctatctggagttcctgaaaggttatctgatcccgaaatatgccgagtttatcggcaaagagatccagacggcctaccttgaatcctattccgaatatgggcaaaacattttcgaccgttatgttacctacgcggatttctggattcaggatcaggagtatcgcgatccggataccgggcagctgtttgaccgcgagtctcttaacgccgagctggagaaaatcgagaaaccggcggggatcagtaatccaaaagatttccgcaacgagattgttaacttcgtactgcgcgccagagcgaataacagcggacgcaatccgaactggaccagctatgaaaaactgcgcacggttatcgagaagaaaatgttctccaataccgaggagctgttgccggttatctcgtttaacgccaaaacgtcaaccgacgagcagaagaaacacgacgactttgtcgaccgtatgatggaaaaaggctacacccgtaaacaggtgcgtttactgtgcgaatggtatttgcgcgtacgtaaatcgtcttaacaaccctggcccggtacacatgttaccgggcctacaacgacagcgaaccgtgggcctgagaagcggcaacacaggcgtagcatacagttggcaaatgtagtacggggggcatatgacctggtttattgaccggcgtctgaacggcaaaaacaaaagcatggtgaatcgccagcgttttttacgccgttataaagcgcaaattaaacagtcgatctccgaggccattaataagcgttcggtgactgacgtcgacagcggcgaatccgtatccattcccacggaagatattagcgaaccgatgtttcatcaggggcgtggcggtctgcgccaccgcgtgcatccgggcaatgaccatttcgtccagaacgaccgaattgaacgtccccagggtggcggcggaggttccggcagtggtcagggccaggccagccaggatggtgaaggtcaggatgaatttgtctttcagatttcgaaagatgagtatcttgatttgctctttgaagatttggccttaccgaatctgaaacaaaaccaacaacgccagctgaccgaatataaaacgcatcgggcgggttataccgctaacggcgttccggcaaatatcagcgttgtgcgctccttgcagaactcactggcgcgacgcacagccatgacggcaggcaagcggcgggaacttcatgcactggaagagaatttggccatcatcagcaacagtgaacctgcgcagctgctggaagaggaacgtctgcgcaaagaaattgcagaattacgtgccaaaattgaacgcgtcccttttattgacaccttcgatttacgttacaagaactacgagaagcggcccgatccctccagccaggcagtgatgttttgcctgatggacgtttccggttcaatggatcaatccactaaagatatggctaagcgtttttatattctgctgtatctgttcctcagcagaacgtataagaacgtggaagtcgtatacatccgccatcatacccaggcgaaagaagtcgatgaacatgagtttttctactcgcaggaaacaggcggcaccattgtttccagcgccctgaaactgatggatgaggtagtgaaagagcgttataacccggcacagtggaatatttacgctgcacaagcatcggacggcgataactgggccgatgactctccgctttgccatgaaatcctggcgaaaaaattattacctgttgttcgttattacagctatatcgaaattacccgtcgtgcacatcagacattgtggcgagaatatgagcatctgcaatctactttcgacaactttgcgatgcagcacatccgcgaccaggatgatatttatccggtgttccgtgaactgtttcataaacaaaatgcaacagctaaagactaaaactatcagccaggtcattatcgcctggctgatttttagcttactgtaaattatctcatttattatatacattagcttacaatcgctttaaatatgacagcgtaacctttacataatttagttccagaaaacaatcattcggaaaaatgattcagtcaacacgtatttccatggggttattctttaaatattgtttatcgttaacgaaaattgatcctggtcaaaactatatatctctgccatcaataaaatccagcactcacattgctctcctttttatggtttctatgggtacacaaaaattaaaagctcaaagcttttttattttcagtttattgctgacgttaattttattttgcatcaccacattatataacgaaaacacaaatgtaaaactcatcccacagatgaattacctgatggttgttgtggctttgtttttccttaacgccgtcatttttcttttcatgttaatgaaatatttcactaacaaacaaattttaccaacactcattttaagccttgcatttttaagtggccttatctatttagttgaaaccattgtaattatccataaaccaattaacggcagtacactgatccagacaaagtcgaatgatgtttctattttctatattttccgccaactcagttttatttgtttaacctcgctggcactcttttgttatggaaaagacaacatccttgacaacaataagaaaaaaacgggaatcctgttgctggcgctgattccttttttagtttttccccttctggcacacaatctgagcagttataacgctgactattctttgtatgtcgtcgactactgtccggacaaccatactgcgacctggggaatcaactatacaaaaatattggtttgtctgtgggcatttttactgttctttattatcatgcgtacacgattagccagcgaactatggccgttaatagcattattatgtctggcatcgctatgctgcaacttacttctactgactctggatgagtataattacaccatctggtatatcagtcgcgggattgaagtttccagtaaactgtttgttgtgtcttttctgatttataacatttttcaggaactgcaactctccagcaaactggcagttcatgatgtgctgaccaatatttataatcggcgctacttttcaacagcgtagagtcattattgtcgcgacctgttgttaaggacttctgtgtcatgctggtcgatattaatcagttcaaacgcatcaatgcccaatggggacatcgtgtgggtgataaagtgctggtttcaattgtcgatattatccagcaaagcatccgccctgatgatattttagcgcgactggagggtgaggtgtttggcttgctatttaccgaactcaatagtgcccaggcaaaaatcattgcggaacgtatgcgtaaaaatgtcgaactcctgaccggctttagtaacagatatgatgttcctgaacaaatgaccatcagtattggcacggttttttcaacgggtgacacgcgtaatatctcgcttgtcatgacggaagcagataaagccttacgcgaagcgaaaagcgaggggggcaacaaagtgattattcatcatatttaagtgcaaaaatattcagagccatgctttttgcgtggcttttgcatacaatttattactattacccctaaatttcccctccccagcggcgcagagatgagtataattagcgcccctgtgccaggccgcaatcgaactttatctggttttctcgtttcactaaccgaaggagtgccatttatcatgaaattgcaccatagaatgctccggcattttatcgccgcaagtgtcattgtgctgacatcttccttccttatttttgaacttgtcgccagcgacagagcaatgagtgcctatctgcgctatatcgtgcagaaagcagactcctcctttctttatgataagtatcagaatcagagtattgccgcgcatgtgatgcgcgctctcgctgctgagcagtcggaagtgtcgccagaacagcggcgcgccatctgcgaggcttttgagtctgccaataatacccatggcttaaacctgactgcccataaatacccgggcttacgcggcacactacaaaccgcatccactgactgcgacacaattgtggaagctgcagcactattacccgcttttgatcaggcagtggaaggcaaccgccaccaggatgattacggttcaggtcttgggatggccgaagagaaatttcactattatctcgatctcaatgaccgctatgtctatttttatgagccggttaatgttgaatactttgcgatgaataactggtccttcctgcagtcaggaagtattggtatcgatcgcaaagatattgaaaaggtatttaccgggcgtaccgtattgtcgagcatttaccaggatcagcgtactaaacagaacgtgatgagtttgctgacgccggtgtatgttgcagggcagctaaaagggattgtgctgctggatattaacaaaaacaatttgcggaatatcttttacactcatgaccgccctctcctctggcgttttctcaatgtcacgctaaccgataccgattcggggcgcgacattatcatcaaccagagcgaagataatctgttccagtacgtcagttacgtccatgacttaccgggcggcattcgtgtctcgttatccattgatattctttactttatcacgtcttcgtggaaaagcgttctgttctggattttgacggcgttaattttgctgaatatggtccggatgcacttccgtttataccaaaatgtgtcgcgagaaaatattagtgatgcgatgactggactgtataatcgcaaaattttaacccctgaactggagcagcggttgcagaaactggtgcaatccggttcttcggtgatgtttattgcaattgacatggacaagttaaagcaaataaatgacaccctcggtcatcaggagggggatttagcgattacgttattagctcaggcgattaaacaatcgattcgtaaaagtgattatgccatccgactcggtggcgatgaattctgcatcattcttgtcgattcgacgccgcaaattgcagcacaactgcctgaacgtatcgaaaaacgtctgcaacatatcgcgccgcagaaagaaatcggcttctcttccggtatttacgcgatgaaagaaaacgatacgttacatgatgcgtataaagcttccgatgagcgtttatatgtcaataagcagaacaaaaacagccgttcatgataaccttctgtggttgtttgcttgtaatctcaggagcgtgaaatgactgaaatggctaaaggaagcgtgacgcatcagcggttaatcgctttattatcacaagaaggtgctaacttccgcgtcgttacccatgaagcggtaggtaaatgtgaagcggtgtcagaaattcgtggcaccgctctaggccagggtgctaaggcactggtatgtaaagtcaaaggcaatggcgtaaatcaacatgttctggcgatcctcgctgccgatcaacaggccgatctgagccaactcgccagccatataggcggattacgcgcttcgttggccagcccggcggaagtcgatgaactcacaggctgtgtcttcggcgcgatcccccctttcagcttccatccaaaactcaaactggttgccgaccctctactcttcgaacgatttgatgaaatcgccttcaatgcagggatgctggataaatccgttattttgaaaaccacggattatttgcgcattgcgcaaccagaactgctcaatttccgccgcactgcgtaactagcctgtccgttcaataagcagaacggacaaaaccagcacaacagcaatggcaaaaaacgatgacgtgataatcagtgtctcgacgaacatttgatcgttcatagcatgcccccgggagatagctgttttcacgttattgttagcgtgcacaaatggcagtttgatgacagttcgcctgattttttatgcaaaaaacgtaaagattttctacttccttcctgcagcaagcgtaaagtaagcaggcttattattttttggcaaggaaaccacgatgtttgatgtcactttgctgatcctgctcgggttagctgcgctgggctttatcagtcataacaccactgtcgccgcttcaattctggtgttgatcattgtccgcgtcacaccgttaagcacctttttcccgtggattgaaaaacaggggctaagtatcgggataatcattctgacgattggcgttatggcccccatcgccagcgggacgctaccgccctcaaccttgattcactcgtttctgaactggaaatcgctggtggcaattgcagtaggcgttattgtcctggctggctgggtgggcgcggcgtgaccttaatgggcagccagccgcaactggtcgccgggctgctggtaggcactgttttaggcgtggcgctgtttcgcggcgtaccggtcggcccgcttattgccgcgggtctggtttcgctgattgtggggaaacagtagttaatcccgcaatatatcggcctggcgtttgccccaggcctttcttaaacatagtaataaaggccgttgttgaatcataccccagcgtatgagcaactttctgtacagtatcgcctttcactaatccctgaagtgccataatcagctgtaactgctgacgccactggcgaaaactcaaccccgtctcttttactatcagtcgcgcaagattgcgttcactcatcgcaaaaaagccagcccattgccctaatgacccccactcgacgggccctttcgccatcatctccaccatcgtgcggattttaggatgagaagaaacgggcaggtgcagctgttgttgtggctgctgagggagttcatcaaacaggacctgaattaatctgcgggtcatcggctcagcacgctgagtcgtcgtcctgtttgccagggttaaaatcaattcccggcataagggcgatattttcaatgtgcaacatgttgtcggcattgtcactgcgctgggttcgataaacagaaaacagagttcagcgttagctgtcacttgattgctatgttccaccccgcccggtatccaaaccgcatattgcggcggcaccatccacaaagcattttccaccgtacaggtaattgcaccatgtaatgctagtatcagctgtcctttgcggtgctgatgtacaggactggttaactcatccgttccggcgtgaatacaaaatgcgaccgcggcttcatggtgtcggtcgggttcatagccattgagattcaacctgtgcatcattttgtccgaatttagcgataatttgtcattttagcttgattcaacataacaataaaaacggtaaggtacagcctcgtttgtaacaatgagaagcatatgacctgttcaacttcattaagcggcaaaaacaggattgtccttatcgctggcattctgatgattgccacaacattacgcgtcacctttaccggcgcagcgccgttactggatacgattcgttccgcttactcgctgacgacagcgcaaaccggcttattaaccaccctgccattattggcctttgcgctaatctcacctttggctgccccggtggcgcgacgttttggtatggaacgtagcctgtttgccgcgttacttttgatctgtgcaggtatcgcaattcgttctctcccttcgccttacttattatttggcggtacagcggtcattggcggtgggattgcattaggcaatgtcttactgccaggattaattaaacgcgatttccctcattccgtcgccagacttaccggcgcatattccctgacaatgggagctgcagcggcactgggatcggctatggtcgtgccgctggctttgaacggttttggctggcaaggcgcgttgttcatgctgatgtgttttcctctgctggctctttttttatggctgccacagtggcgaagccaacaacatgcaaatttgagtacctcgcgcgccttacatactcggggtatctggcgttcgccgcttgcctggcaggtcacattgtttcttgggatcaactcactggtctattacgtgattattggctggcttccggcgatcctcatcagtcgcggctatagcgaagcacaggcgggttcactgcatggtttgctgcaactagccacagcagctcccggtttgctgatccctcttttcttacatcatgtgaaagatcagcgtggtattgcagcgttcgttgccttgatgtgcgcagtgggcgctgttgggctctgctttatgccagcgcacgcgatcacctggactctgcttttcggttttggttccggcgcaacaatgatactggggttgacgttcattggtcttcgggcaagttctgcgcatcaggcggcggcactctcggggatggcacaatccgtcgggtatttgctggcagcctgtgggccgccgctgatgggtaaaatacacgatgctaacggtgactggtccgtaccactgatgggtgttgccatactttcactactgatggcgattttcggactttgcgccgggagagacaaagaaattcgctaatatccggtgctatagtgacgtgacaaatcatgcgtgaaagggagaacaaacacgatgaatattcagtgcaaacgcgtttatgatccggctgaacagagcgatggttatcgcgtactggtcgaccgcctctggccgcgcggtatcaaaaaaccgatttagcccttgatgagtgggataaagaaatcacgccgtcaacggaactgcgcaaagcctttcacggcgaagtcgtcgattttgcaacctttcgcgagcaatatcttgcagaactggcgcaacacgagcaagaaggaaagcggctggcggacatcgccaaaaaacagccgctgaccctgctctacgcagcaaaaaacaccacgcagaaccatgcgctggtgctggccgactggctacgtagcttgtgattttagtacagcatccggcggttatttttcaccagccggatggtcccgtcgccacaatgcccattcatcaatcgtttcaccgcccggtaatttgcaattgttgctgaccccttgcgctgtctgcactggaatgagcgtcccgcccttctgctggcaatagaccgacgccggatttgccataccaatctgcggcggtttaggtgcttctggctgagaagaggttgaacaaccagccaggaccagcaagcaaggcaaagcaaaactgataattttcatttattgatctcacacatttatctacgcttagagtatcgcggtatcgttttgttttgcagcactatttttattacattcactcaaaacatattacgtcttgtttcatctttgttgatgatgttttatcatgcctgcaaagattaaataatcagcatttacccgccgtatcctggagttgtttcgtgtcagatcagattatcgcccgcgtctcgcaatcccttgccaaagaacagtcactggaaagtctggtccgacagcttctggagatgctggaaatggtcactgatatggaatcaacctacctgaccaaagtggatgtcgaagcgcgcctgcagcatattatgtttgcccgtaacagccagaaaatgcacatcccggagaattttaccgtctcgtgggattactcgttatgcaaacgcgctattgatgaaaactgctttttcagcgatgaagtccctgaccgttggggcgactgtattgcggcacgcaatcttggaatcaccacatttctgagtacaccaattcacttaccggatggatcattctatggcacgctttgcgccgccagcagtgagaagcgccagtggagtgaacgcgcggaacaggttttacagttattcgccggactgattgcacaatatattcaaaaagaggcgttggttgaacagctgcgcgaagccaatgccgcgctgattgcgcaatcgtataccgactcgttaaccgggctaccgaatcggcgggcgatttttgaaaatctgacgacgctgttttctctcgcccggcatcttaaccataagataatgatcgcgtttatcgatctggataacttcaaattaatcaatgaccgttttggtcataatagtggcgatctgtttctcattcaggttggcgagcgccttaatacgctccagcaaaatggcgaagttattggtcgtctcggcggtgatgagtttttggttgtttcactaaacaacgagaatgcggatatttcgtcgctgcgagaacgtattcaacagcaaatacgtggagaatatcacttaggtgatgttgatttgtattatcccggtgccagtcttggcatagtagaagtcgatcctgatacaaccgatgcagacagtgccctgcatgctgccgatattgcgatgtatcaggagaaaaaacacaaacagaaaacaccttttgtcgcgcatccagcgctacattcctgaggcgtattcacatccttttgattggtgataacatgcgaatcggtattatttttccggttgtaatctttattacagcggtcgtatttttagcatggttttttattggcggctatgctgccccgggagcataaagatgaaaaaaacaacgattattatgatgggtgtggcgattattgtcgttctcggcactgagctgggatggtggtaacgtcacctctaaaaaatagcaaaggctgcctgtgtgcagcctttgtgcaatttaagcgttaacttttaatcttcctgtagataaatagcacgacaatcgcaccaataacggcaaccacgaagctgccaaaattgaagccatcgactttaccaaagccaaacagtgtgctgatccatccgccgactacggcaccgactatccccagcagaatagtcataaagaatccaccaccatctttacctggcatgatccacttcgccagaataccggcaataagcccaaaaataatccatgacagaatgcccattgtttcctcacttatctgttttgcattagcgggttagtcgctgataaaaagcatagcacaacatcgggagggcaagatttgtgacgagcatcacggaggatttttttgcgatggcgcagaaattgcgccatcaacgatcggtgataattaccaaccacaaacatcatgttcgttttccgtgtcttgacatcctccacgccctgaatgacgaggatccctgctacgttcaggctgtcgcctgaatcatttcggtgggttcctgcttcaacgagcggcctgactgcaccatctctccacaggcaagaacggcgtgccccgccgctaaaatgttacgagcgccgtttacatcggcgttcgctgtatatccacatacctggcatctgaattgactttgtgacaggcgattttctttcgctgtatgaccacagcacgcgcaacgctggcttgtgtacgctggcggaacagcaagcacctgaccgccactccagagctgcttgtactcaagctggcggcgcatttcataccagccctgatccagtatcgaacggtttaaacctgattttgcccggacattgcgccccggctggctgaccgtacccgctgctgactttgacatgttgctgaccttcaaatcctcaatgactatcattgcgtggtttttgctgacggtcgttgtgactttatgaaggtagtccctgcggatatttgcgatacgggaatgcagtcgctgtattttgcgtttctgcttctgccagttattgctgaatttgaccttgcggcttaactgtcgctgaagtctcgccagcgtcttctggtttttctgaaaactgtttacaggcccaaagactgtgccatctgacagcgtggcgagtttagccacgccagcatccagcccgatcattgatgctgaagggtgaaccggagttgatacttcactttctgtctgaatactgatgtaccacttaccgcaggactggctgaccgtgacatttttcacaacacccgtgacctgacggctattccggtagcgcatccagcccagtttcggcagaaaaatacggctgttttcctgatcgagctttacgccctgcgggtagcggaatgcatcattctgtccccgctttttgaatcggggaaaagcagcccgcttccggaagaagtttttgtaagcccgctcaaggtctttcagtgactgttgcaatggctgtgagggcgaatctttaagccattgcgtttcagtggcgtttttccactcaaccagccaggaagccattttcccgtaagggatgtatttattaccggcctcatgattctcattctgacgtgccagagcacgattgaaaacgaaacgacatgcgcctgcgaagcgcctcatttcacactcctgttgaccacctggtcttaactggaatttaaatgcctgtaatcgtttcacaggtcaaatgatactttggtctgtgaaaaaagaaaccgatatccggcgtggaaggcattgtgttttcctgatgcatgttcacctggtctttgtcaccagataccgactccagatttttgaccatgacgcgacagaaaaactacgcacttacttttcaaatgtatgtgctgattttgaagctgaacttgttgaaatggatggcgaaccagatcacgtccatttgttaattaactatcctcccaaactggcgatatccagtctggtaaacagcctcaaaggcgtatcgggtaggttactgcgacgagatcgaccagatattgcagtcaggtattactacaaaggcgttttgtggagtcctggctattttgccagtagctgcggaggtgcgccaatatccgtcatccgccaatacattgaacaacagcaaacacctggtcaggtggaaaaccgcgccttatatccccgccctgaaggacggggttttacggcgcaccggataagaacgcacggtattcaccagatcttttatcacttcagccgccacttctggcaccagcaaagtcatcggcgtctctgtttcataatcgacagaaacgccattgctgttattggtgacggtcacggtatacgttgctttgcccatgattcatttcccgttatgaatgactttccgttgttgcgcaccttccatcaggacttcaggagccacgaagaagtcaatgttgaaataagtatcgtcagtcatggcttcaatgttgtgccacttttctggagggaacaccgcaaactgccccgcttcgataaggatcacctgatcaggctctgcactgtgttcatcagcgtagccgagatatttgaccgccccatgcataacggaaaggcgtgggtaaacccccgggcgcgttcctttatcaagatgacgttcgaatattccggcaggcgcagtttgtttattccagaaaggcgttgagcgcgtatgaatataattctgtaggatttgcagcatcctattccctccttcggggaatgcgctgaaaacggtttattccagccgtttcagggtacgcctgataatttgcattttaaataccatttattggttactttttagcaccatatcagagaaaaatcagggaggattacaagtgggaagcccgcgacaacgcgggctgaatgtatcaggattgcagcgtcgccagtcgggcggcgaaacccacgaacatcaaaccaatcagtgagttgccaactttagccagtttctttttggtacgtatgtactgcgtgacaaaagcaccagaaataatcaggaagctcaaatagcagaaactcaccagttccagcgtcgtcgccagaataaagaatgaaattcccgtatgtggggcattaacatcgataaactgtacgaaaaacgacacatagaacaaaatggctttcggattagtcaggctcaaaattaacgcgcgtttaaaaatggccccgtattggggctcatcggatttggcctcgttatttttacccttcagggtcgcgtagagaattttactccccagatagagcaaataaaacgcaccaagataacgtacaatgttgaataatatcggggtggtcttaattaatgtcgccactccagcccatgccagaaacatcaatactgcatcgccaataaatacaccgcaggccgcaagataaccgcctttcataccgctactgacgctatttttgagtacaaacagggtatttggccctggcaccaacacaataaaaatggccccaaccagataggtccagtaattcagaaccccgtattcagcgaacacattaacctctttaattatctttcgatcatgcgcgattaaaggtgaatatgctaaccaatctgtagcggcttagaaaggagaaaatcaggttttaacccgatatcaacccgataattgaatcattaatcaggcatgctccagtgaaaaattcgggtagtgctcggcaaaatactggcgtaaaaattctaccgttatccgcactttcgctgacgtcgccagccttgaaacataaacggcccagacgttcgctggctggtaatattccggtagcacttgcactaaatgaccactggcaatgttttcgctaacatcccaccaggagcgcagagcaatcccctgcccatcgagacaccactgatggacaatttctccatgattagacgacagtgggccggtgactttaatcgcatggtggccttctttattgcgtaattgccagacaccaaaaggatgatcgcgctctttaatgaccaggcacggcaatgcggaaagatcggttaaatgtttcggcacgccatgttgcgcaataaattccggcgacgcgcagagaatgcggtaattagtcgccagtttgcgggcgattaaattaggggcgatgtcatcgccaatgcgaatatcgagatcaacaccttcattgaccaaatcgaccaaccggtcttccacatcaaaacgtaattccagttgcggatacgccttagccagcgctgataacgccggagccaccacctgtcgtccaaaaccaaagctgctgataatacgcagcatcccctgcggcacctgacgcacgtcagaaagttcgtccatcatctgaccgacatcctgcaaaatccgctgcgcccattcataaatccgctctccttcttcggtaatggtgacgcggcgggtggtgcggtgtaacaacaccacgtttagcgtttgctccagcaaggcgatgcgcttgctgacgaacgccggtgaaacgcccagttcttccgccacggcggcaaaaccagcccgacgagccaccagcataaagacgcgcaaatcattcagcagcggtaaattattcatgattcgtgttttatgtttcaccagttacggggattaattccttttcagtcaattataggatggtgatgttgtcaattttgatggtcaggaagtgagaacccaatgatgaaaacgatgcgtattgctgcgatcccgggagacgggattggcaaagaagtccttcctgaagggattcgcgtgttacaggctgccgctgagcgctggggcttcgccttgagttttgagcaaatggagtgggcgagctgcgagtattacagccatcacggtaaaatgatgccggacgactggcatgagcaacttagccgtttcgacgccatctattttggtgccgtcggctggccggacaccgttcctgaccatatttcgttgtggggttcgctgctgaaatttcgtcgtgaattcgaccagtacgtcaacctgcgcccggttcgtctctttcctggcgttccctgcccgctggcgggaaaacagccaggcgacatcgatttttacgtggtcagggaaaacaccgaaggcgaatattcctcgctcggcggtagagtgaatgaaggtacagagcatgaagtcgtcattcaggaatcggtatttacgcgtcgtggtgtcgatcgcattttgcgttatgccttcgaacttgcgcaaagccgcccacgtaagacgctaacttctgccactaaatcaaacggtttagccatcagcatgccgtactgggatgagcgagtggaagcaatggccgagaattacccggagatccgctgggacaagcagcatattgatattctctgcgcgcgttttgtgatgcagccggaacgcttcgatgtggtggtggcgtccaatttatttggcgatatcctttccgatcttggcccggcctgcaccggcaccattggcattgccccatccgccaacctgaatccggaacgcactttcccgtcgctcttcgagccagtccacggttccgcgccggatatctacgggaaaaacattgctaaccctatcgccacgatttgggccggtgcaatgatgctcgattttctcggcaatggcgatgagcgtttccagcaagcgcataacggtattctggctgcaattgaagaagtgattgctcacgggccgaaaacacctgatatgaaaggcaatgccaccacgccacaggttgccgacgcgatttgcaaaattattttgcgttaaggtcaaaccagtttatttgaaccgcgtcactgacgcggtttttttattcgttctttgcagtaaataacctgcgtcatttcaccttttattgtttccgtttcgtgttttatggctttccgtattcttaattgtttaatttatgtaacatgcaaataatcaatttgttaaacacaacatacaactcattaccctgcaaataattacaactggcaaaagccagagacgggcttttatgcccaggagatgactcatgatgagcaatgttaagaaaaaagatgtgccgctgataagcatcagcctggtggccattcttttcatcgcagctgcattaagccttttcccacaacaatcggccgacgcggccaacgcaatatacacttttgttacgcgtacgttaggttccgccgtacaggtattggttttgctggcaatgggactggtgatttatttagccaccagtaaatacggcaatattcgtcttggcgaaggaaaaccggaatacagcacgctctcctggctgtttatgtttatttgtgccggtttaggttcttctacgctttattggggggttgctgaatgggcctattattatcaaacgcctggattaaatatcgcaccgcgttcacaacaggcactcgaatttagcgtcccttactccttcttccactggggcatcagcgcctgggcaacttatacgctggcctcattaatcatggcttatcactttcatgtgcgtaaaaacaaaggtctgagtctttccggcattattgccgcgattaccggcgttcgcccgcaaggcccatggggaaaactggttgatttgatgttcctgatcgccactgtcggcgcactgactatttcccttgttgtcaccgcagcaacctttactcgtggactttccgcgctgaccggtttacccgataacttcaccgtgcaggcatttgtgatcctgctttccggcggcattttttgcctaagctcgtggattggtatcaacaacggtttgcaacgtctgagcaaaatggttggctggggcgcgttcctgctgccattactggtgctgattgtcggcccaaccgaatttattaccaacagcatcatcaatgccatcggtctgaccacgcaaaacttcctgcaaatgagcttattcaccgatccgcttggcgatggttcatttacccgcaactggaccgttttctactggctgtggtggatctcatacacccctggcgtagcaatgtttgtcacccgcgtttcccgcggtcgtaagattaaagaagttatctggggactgatcctcggcagcaccgtcggttgctggttcttcttcggcgtaatggaaagctatgccattcatcagtttatcaatggcgtaatcaacgtcccacaggtgctggaaacactgggcggcgaaacagctgtacagcaagttctgatgtcgttgccagccggtaaattgttcctcgccgcatacctgggcgtgatgattattttccttgcctcgcatatggatgcggtggcctacaccatggctgcgaccagtacgcgtaatctccaggaaggtgacgatcctgaccgtgggctgcgtcttttctggtgcgtggtgatcactctgatcccgctttccatcttgtttaccggtgcttcgctggaaacgatgaaaaccaccgtcgtgctcacagcccttcccttcctcgtcattttactggtgaaagtcggcggatttattcgctggctgaaacaggattacgccgacattccggctcatcaagttgaacattatctcccgcagacaccggttgaagccctggaaaaaacgccagtgctccctgcgggaaccgtattcaaaggcgacaactgagcgccatcatcctaacgataaaggtatccctatgagcaatctgagccctgactttgtactacccgaaaatttttgcgctaacccgcaagaggcgtggaccattcctgcccgtttttataccgatcagaacgcgtttgaacacgaaaaagagaacgtcttcgccaaaagctggatttgcgtcgctcacagcagcgaactggcgaatgccaatgattatgtgacgcgtgagatcattggcgaaagcatcgtgctggtacgcggtcgtgataaggttttgcgcgcgttctataacgtgtgtccgcaccgtggtcatcagttgttgagcggtgaaggaaaagcaaaaaatgtgattacctgcccgtatcacgcatgggcattcaaactcgatggcaatctggcccatgcacgtaactgcgaaaacgtcgccaatttcgatagcgacaaagcgcaactggttccggtgcgtctggaagaatatgccggattcgtcttcatcaacatggaccccaacgccaccagcgtagaagatcagttacccggtctgggcgcgaaagtgctggaagcctgcccggaagtccacgatctgaaactggcggcccgctttaccacccgcacgcctgccaactggaagaacattgtcgataactatctcgagtgctatcactgtggtccggcgcatccaggtttctccgactccgtacaggttgatcgttactggcacaccatgcacggtaactggacgctgcaatacggtttcgccaaaccgtccgaacagtcgtttaaatttgaagagggtacggatgcggcattccacggtttctggctgtggccgtgcacgatgctgaacgtcaccccgatcaaagggatgatgacggtcatttatgaattcccggtggattctgaaactaccctgcaaaactacgatatttacttcaccaatgaagagttaaccgacgagcaaaaatcgctgattgagtggtatcgcgatgtgttccgtccggaagatttacgtctggttgaaagcgtacagaaagggctgaaatcgcgtggctatcgtggtcaggggcgcatcatggccgacagtagcggtagtggcatttccgaacatggtatcgcccatttccataatctgctggcgcaggtgtttaaggactaatgacatcggcggcggtattttccgccgctgggctgatttttgatggagtacagcaatgtcagactatcaaatgtttgaagtacaggtgagtcaggtggaaccgcttaccgaacaggtgaaacgcttcacgctggtggcaaccgatggcaaaccgctgcctgcgttcaccggaggaagtcacatcattgtgcagatgagcgatggtgataaccagtacagcaatgcgtattcactactgagttcgccgcatgacacctcttgttatcagattgccgttcggctggaggaaaactcgcgcggcggttcccgctttttgcatcagcaggtaaaagtgggcgatcggttaacgatttcaacgcctaataacctgtttgcgctaattccctcagccagaaagcatctgtttatcgcgggcggtattggtatcacccctttcctgtcgcacatggcagagctgcaacacagcgacgtcgactggcagctacattactgctcgcgaaatccagaaagttgcgcatttcgtgatgagctagtccagcatccgcaggctgagaaagttcacttgcatcactcatcaaccggaacacgactggaattagcgcgattattggcggatatcgaacctggcacacacgtttatacctgtggtcccgaggcgctaaatgaagcggtaagaagtgaagctgcgcgtctggacatcgtcgccgatacgctgcactttgagcaatttgctatcgaagacaaaaccggcgatgcctttaccctggtgcttgcccgttccggaaaagagtttgtggtgccggaagagatgactattttgcaggttattgaaaataataaagccgcgaaagtggaatgtttatgtcgtgaaggggtatgcggaacctgcgaaacagcaatactggaaggtgaagctgaccatcgggatcagtattttagcgatgaagagcgtgccagccagcaaagtatgttgatctgttgttcgcgtgcgaagggtaaacgcctggtgttggatttgtagtttgccaaagccggatgtggcgctgagcgcgcccagtccggcttcggaagattttactgcggatattcctgcaataaattgtgtaatgcttccgccatcagctcaccacgccagccggaaatcagctccggcaaattgttctgcggtttcagtttccagtgccagttcagcagttggttgatttgccgacgcgatgccagcaattcggcgctgatcttatgcgtttcgctcacgtcagtaatcagcgacttaatcgctttaaacgctttacgataacccggcatgtccatcaggttaagcatcggctgcggtaaggcctcttccggcaatgtctgcgctttttccaccagcgccagcagcgttttaccgtgaaagcggatttcgctaccggataaacccaggctgtccagttcgcctaaacttcccggcatataacgcgctaccgaccacaaatgctcttcacgcacgacaaagttcaccgccagatcgcgctctcgcgccttgcgcagtcgccagtcggctaacagttgcagacaggccagttggcgtgtgcgtaattgccaggcattggtgatatcacgccaggcatcttccggcgcaacgacttcctgacgacgcatttgcatcaggcggcattcatccagcgccgcaggtagccagccggaggcctccgtttctaccataagcttggcggtgatcggtaacagataccagacatccgccgctgcgtattcacactgacgttcggtcagcggtctggccagccagtcggtgcgcgattcactcttgtccagcgtaacgccggaatactcttccaccatggaagcgaaaccccatgacatcgggcgtccgcagaaggcagcaaggatttgcgtgtcaatcaagggttgtggtaattcgccaaagacattgaggaacacttccagatcttcactgcctgcatggagaaattttgtgatggacggatcgcgcaggatcgctttcagcggtgaccagtcggtgatcccgagaggatcaattagcgccagatgctcgccatcgaaaagttgaatcaaccccagctgcgggtaataagtgcgcgtacgaacaaattcagtatccagggctatcgccggaaaggcacggacggcttcacacaaagaagccagcgcatcgtccgtggtaatcatttggtaattcaaattgttttctctttagtgggcgtcaaaaaaaacgccggattaaccggcgtctgacgactgacttaacactcaggctttattgtccactttgccgcgcgcttcgtcacgtaattctcgtcgcaaaatttttccgacgttagatttcggtaactcatcacgaaactccaccagcttcggtactttgtagcccgtgagctgacggcggcaaaaggtcaccagtgactcttcggtaagcgatggatcttttttcactacgaagattttcaccgcttcaccactggagccggaaggtacgccaacagccgcgacttcctgtacgccaggatgctgcatgacgacatcttcaatctcgttgggatagacgttaaaaccggaaaccagaatcatgtcttttttacgatcgacaatgcgcaggaacccttcttcatccatcaccgcgatgtcgccggtgtgtaaccagccatttttgatgatctcatctgtagcatccggacgctgccagtaacccagcatcacctgcggtcctttgacacaaagctcacccggttgacccggtggtacttcattatcatcatcatccaccagtttggcttccgtcgacggcaccggcaaaccgatgctaccactatgataatcaatatcatatgggttaacgctgaccagcggcgcacactcggtaaggccatagccttccagcagatactgtcctgtcagtttcacccaacgctctgccaccacttgctgcactggcatccctccgcctgcggaaagatgcagactggagaaatccagctgctggaactctttattgttcagcaacgcattgaacaaggtgttaacgcccgtgatagcggtaaacggatatttcgctaactcttttaccaaccctggaatatcgcgcgggttagtgataagcaggttctgcccacccagttcgataaacagcaggcagttaatggtcagggcaaaaatgtgatacagcggcagtgccgttactaccagttctttacctggatgcagcaacggcccataggtggcgttgacctgttccaggttcgccagcatattgcggtgagtcagcatcgcgcctttcgccacacctgtggtgccgccggtgtattgcaggaaggctaaatcttccggcaccagttcgggtttgacgtactgcatccggtagccgttatgcagtgcgctacgaaatgaaatggcatctggcagatggtatttcggcaccaaacgcttgatgtatttaacaacgaaattgactaccgtgccttttgccgtagatagctgatcgcccatacgggtcagaattacgtgctgaacggcggttttatcaaccactttttccagtgtgtgagcaaagttagacacgataacaatcgccgatgcgccgctatcgttaagctgatgctcaagctcacgcggggtatacaacgggttaacgtttacgacgatcatccctgcacgcaaaatgccaaacagcgccaccggatattgcaataaattaggcatcatcaacgcaacgcgatcgcctttcttcagccccaacccttgttgcaaataagcggcaaacgcgcgactgcgttcttccagcttgcggaaggtcatcacctcccccatattcacaaacgcaggctgatcggcgtagcgcgcgaccgactgctcaaacatatctaccagagattgataacggtcagggttgatctccgtcggaacgtccgcgggataacggttaagccaaaccttcttcaattcttcacctctaaaatgcgtgttcgtcgtcatcgcaaccccaaatgatatacatgccgttaacataatattaactcatcataccagcttgataattacccaacgaaaaggttgcgaagcgcgtcactatttatttttatctttaccgtaagaatgcagaaacagcggaccagccgctgtttctttttctttaaaaacaagcaattattcagttacaactgtttgtactctcgcgggaccgggattataccagccccatccgccgtagccatagggccagccacgaccgccataaaaccatggatcaatcggctgaggcggcataatcacctgctgggttaaatgccaacgtttgtaacccgttacttgcatcaccataaatttatagggcgtgttgccgatttttccgtcaaccgcaccagtgattggcccgactaccgtaaccagttgtccacggaaatccaccgggtccagaaaaccgttcatatcggcataaatgcgaccgcgagaaggttctcccagcgtcggtctggctccgctgtccagcggtacggtagcaatttccaggcgggttttcccttgctggttttgtaccgcaaccactttgccaccaaagcgtgcctcctgaccaacgtacagctgcggcgcactcatcacccgaactaaatcttgttgcggcgtgggactgctgcctttaatggcgtccggcacagtgacacaaccgctcagcattagcgcaaacgtacctgccagtatgcctttgataacattcttttgaaccgccatgatgcgactcctttttttctcagggcatactcttaagattcattctttgcccggaagtttcttccatgcgacgttgttacgcaaataaaccggctcggcatgttccaccgccaccgttttaccctcggcaaatatctgacaagcaatcggcagcatatcttctgcagcgggcagtaacacttcgccatcgcgcaaaaccagcccgctctctttaccgagatccggccaggcttgccagcccgtccctaccgtcacccattcgccggaaagctgttgcattcgttcatggacgatttcgggtttgagtacggcttcggtttcttcaccgtgccagataccgttttcatcacgctgatattcggcccagtaaacttcgcccattcgcgcgtcaatggctgccagcacacgggttgcgccgtttttgcgccacgccccttgcgccatcgtcattagcgtggagacgccaatcatcggtagctctgcgccaagtgccagcccttgcgcaatgccaataccaatgcgcacgccggtaaagctaccggggccgcgcccgtaagccagagcgttaatatcagtcagggaagttccgctggtggtcaggatatcctgcaccatcggtaagattcgttgagtatgttcacgagggcaaagctcaaaatgagcgttgacagtaccgtcgttccacagggcgacagagcaggcctctgtcgcggtatcgatagccagaattcgcatgggtcttcgtgcttagatcaataaaaaggcgcgcatcataccatactccgtaacaaattacctggaggatggtatcgcaaggaaacgaaccgcacgggcaatgtcacgagtgcgtggcgcgggcggcagactggcgagaaacgtcgcgccgtaaggacgcatcaccagccgattgtcacaaatcaccagcacgccacgatcgtcggcgtcgcgaatcagtcgccctaccccctgtttgagagtaatgacggcatctggtagttgcacttcatcgaacgggtcgccaccgcgcaaacgacaatcttccatgcgcgcttttaacagtggatcatccggcgaggtaaacggcaacttgtcgataatcaccaatgacaatgtatcgccacgcacgtccaccccttcccagaaactactggttgccacaagaagcgcgttaccggcgctgacaaattgctgcaacagttgccctttgctggtttccccctgcaacaaaacgggaagcgtcatggtagcgcggaactgctcggccagatcgcgcatcatggcgtgcgaggtacaaagcataaaacaacgaccgttgttagcttcgatgatcggtcgcagcattgccgctaactggcgagcagaacctggctggttggtttgcggcagattgcgcggcacacagagtaacgcctggcggctgtaatcaaacgggcttggcaatagcaacgactccgcctgttctatcccaagccgcgaggtgaaatgatgcagatcgtcgttcaccgacagcgttgctgaggtgaagatccagctaccaggcttttgcgccattaactctttgaatttatccgccacgctgagcggcgtgagagccagagtaaaatggcgcgaagtgcattcgtaccaatagctgtagcccggctgattgatctcttttagccgcttcagccgtgtgcgatacaacgtagcgcgctcaaatgccgcatccagcaaggcggaacgccccagtgacagtttcgccacgtcataacaaagttccagggtgtcatcgagcagtaaaaatgcccgctgaatttgcggattagctaacagctcacgcaggttaccgcgataacctggctcaccgagttgcagacgaaaatcctgcgcactctgggcaagacgatcagcgcacttttgtaactgctgggtgtcttttaattcggtgcggtaagcgatggtgatgtcttttgccaggtcgagcagttgtcgactggagagtgactgaccaaaatactggctggcaatgtccggtagctggtgggcttcgtcgaagatcatgacgtccgcttccgggatcagttcgccaaatccactctctttaaccaccatatccgccagaaagagatgatggtttaccaccaccacatcggcgtccatcgcttttttacgtgctttgaccacaaagcaatctttatacatcgggcagtcgctgccaagacagttgtcgttggtgctggtgaccagcggccacgcctgtgaatcttccgccacgctgacgcaggtgctgatatcaccatcgactgtttgattagaccaggagcgcagcaggatcacatcgcttaagatttgtaccggcagatcgccccccgccagcgcctgctgttcgagacgctcgaggcagaggtagtttgagcgccctttcagcagcgccacgttgcccgtatatttcaatgcctttgagactgttggcaaatcgcggctgtagagctgatcctgcaacgcttttgagccggtcgagataatgactttctttttcgcccgcagcgcaggagccaggtaagcgtaggttttgcccgtaccggttcctgcttccaccaccagcggctggcctttttctatcgcctgggtgacggctaccgccatctgtcgctgtggttctcgcggcttaaagcctggtatcgctttcgccagctgaccgtctggtgcaaaatcgtccgtcacactaccccctgttgatttgaacagggattatgtcaggatgagggcgctttcgccagttgaagtggtgacggcgacctcacattgtggcagtctttgcagcacgaaaatggaaggataatgaggacaaaatgatgactatcgttcgtatcgatgctgaagcccgctggtctgatgtggtaatccacaacaacacgctctactacactggtgtaccggaaaacctcgacgccgatgcctttgagcaaaccgccaacacgctggcgcagattgatgccgtgctggaaaaacagggcagcaataaatcgagcattctggatgccaccattttcctggccgataaaaacgacttcgcggcgatgaataaagcgtgggatgcctgggttgtcgcgggtcatgcgccggtgcgctgcacggtacaagcgggtttgatgaacccgaagtataaagttgaaattaagattgtggctgcggtgtaagctttatcgaagcaaaataagtcagacgataatttatcgataatactggtcggttttacataaatcgaccagagattaagatattacctgttgatgctcctgctaattcattatttatttttataatttcaattttatctataaaactaactatataaataaccataaccatgccgttgtgttcgccctctgactagcaactctggttttctttcttagctgaataatctggttatagcgtgaggactgaccgttaaatttctccatcttactggataacacaccatgagctgctacctttaaaacacctgaatgtcaacaggttaactcgtgccatatcgttataatccctttgatattagatgcaaattaaggtcatatatagtcttatcgataacatggttaattttaaggataagaatatgcctgctgtaatagataaagccctggatttcattggtgccatggatgtatcagcgccaacaccaagttcgatgaatgaaagcacggcgaagggaatctttaaatatttaaaagaactgggagtacccgcgagtgccgctgatattacggcgcgagctgaccaggaaggctggaaccctgggttcacggaaaaaatggttggatgggcaaaaaaaatggagtctggtgaacgcactgtaattaaaaatcctgaatacttttcaacatatatgcaggaagaactaaaagcactggtctgagcttaatttatatcagcataaatgggtcaggacgcttttaatcacatataaaaagcgtccttttctcacaatcaaataatcatcggattctataacgaaatcgatacggattagtgtgttactcgtcttcatcctcaaaacgcgccacgattcgctcgccggagtggttggcacgcagctcttctgccaccagcgcgattgcctggccgctgctcatcccttgtgccatcagttcctggatccgctcgacagctttttgctgctgttcatgggtgagtgaaggtaaacctgcaaacattgttaactcctgctaaattgttggcgctaattatttcatgctacccggcacatagccagtagagtcaggactgatgaagacgttatctcccgctgtgattactttaccctggcgtcaggacgccgctgaattttatttctcccgcttaagccacctgccgtgggcgatgcttttacactccggctatgccgatcatccgtatagccgctttgatattgtggtcgccgatccgatttgcactttaaccactttcggtaaagaaaccgttgttagtgaaagcgaaaaacgcacaacgaccactgatgacccgctacaggtgctccagcaggtgctggatcgcgcagacattcgcccaacgcataacgaagatttgccatttcagggcggcgcactggggttgtttggctacgatctgggccgccgttttgagtcactgccagaaattgcggaacaagatatcgttctgccggatatggcagtgggtatctacgattgggcgctcattgtcgaccaccagcgtcatacagtttctttgctgagtcataatgatgtcaatgcccgtcgggcctggctggaaagccagcaattctcgccgcaggaagatttcacgctcacttccgactggcaatccaatatgacccgcgagcagtacggcgaaaaatttcgccaggtacaggaatatctgcacagcggtgattgctatcaggtgaatctcgcccagcgttttcatgcgacctattctggcgatgaatggcaggcattccttcagcttaatcaggccaaccgcgcgccatttagcgcttttttacgtcttgaacagggtgcaattttaagcctttcgccagagcggtttattctttgtgataatagtgaaatccagacccgcccgattaaaggcacgctaccacgcctgcccgatcctcaggaagatagcaaacaagcagaaaaactggcgaactcagcgaaagatcgtgccgaaaatctgatgattgtcgatttaatgcgtaatgatatcggtcgtgttgccgtagccggttcggtaaaagtaccagagctgttcgtggtggaacccttccctgccgtgcatcatctggtcagcactataacggcgcgactaccagaacagttacacgccagcgatctgctgcgcgcagcttttcctggtggctcaataaccggggctccgaaagtacgggctatggaaattatcgacgaactggaaccgcagcgacgtaatgcctggtgcggcagcattggctatttgagcttttgcggcaacatggataccagcattactatccgcacgctgactgccattaacggacaaatatactgctctgcgggcggtggaattgtcgccgatagccaggaagaagcggaatatcaggaaacttttgataaagttaataagatattacgccaactggagaagtaagacgtggaataccgtagcctgacgcttgatgattttttatctcgctttcaacttttgcgcccgcaaattaaccgggaaaccctaaatcatcgtcaggctgccgtgttaatccccatcgtccgtcgaccgcaaccggggttgttgctgactcagcgttcaattcatctgcgtaaacacgctggacaagtggcattccctggaggtgcagtcgatgacacggacgcatcagttatcgccgccgcgctgcgcgaagctgaagaagaggtcgctataccgccttccgccgttgaagttatcggcgtgctgccgcccgtcgatagcgtaactggctatcaggtaaccccagtggtcggcattatcccgcccgatctgccgtatcgcgccagtgaagatgaagtctcggcggtgtttgaaatgccgctcgcccaggcattacatctgggtcgttatcaccctttagatatctaccgccgtggcgattcacatcgggtatggctgtcctggtacgaacagtattttgtatggggaatgaccgcaggcataattcgtgagctggcgctgcaaattggtgtgaaaccctgactatacttatctttacatctacaaaacactacttgagacaatcatcgcaatattagttaaatcgcggtttttgattagtttaattcatgtgaatagttaagccagtcgccgcgttccctcttacactatgcgctgttattagttcgttactggaagtccagtcaccttgtcaggagtattatcgtgattagtctattcgacatgtttaaggtggggattggtccctcatcttcccataccgtagggcctatgaaggcgggtaaacagttcgtcgatgatctggtcgaaaaaggcttactggatagcgttactcgcgttgccgtggacgtttatggttcactgtcgctgacgggtaaaggccaccacaccgatatcgccattattatgggtcttgcaggtaacgaacctgccaccgtggatatcgacagtattcccggttttattcgcgacgtagaagagcgcgaacgtctgctgctggcacagggacggcatgaagtggatttcccgcgcgacaacgggatgcgttttcataacggcaacctgccgctgcatgaaaacggtatgcaaatccacgcctataacggcgatgaagtcgtctacagcaaaacttattattccatcggcggcggttttatcgtcgatgaagaacactttggtcaggatgctgccaacgaagtgagcgtgccgtatccgttcaaatctgccaccgaactgctcgcgtactgtaatgaaaccggctattcgctgtctggtctcgctatgcagaacgaactggcgctgcacagcaagaaagagatcgacgagtatttcgcgcatgtctggcaaaccatgcaggcatgtatcgatcgcgggatgaacaccgaaggtgtactgccaggcccgctgcgcgtgccacgtcgtgcgtctgccctgcgccggatgttagtttccagcgataaactgtctaacgatccgatgaatgtcattgactgggtaaacatgtttgcgctggcagttaacgaagaaaacgccgccggtggtcgtgtggtaactgcgccaaccaacggtgcctgcggtatcgttccggcagtgctggcttactatgaccactttattgaatcggtcagcccggacatctatacccgttactttatggcagcgggcgcgattggtgcattgtataaaatgaacgcctctatttccggtgcggaagttggttgccagggcgaagtgggtgttgcctgttcaatggctgctgcgggtcttgcagaactgctgggcggtagcccggaacaggtttgcgtggcggcggaaattggcatggaacacaaccttggtttaacctgcgacccggttgcagggcaggttcaggtgccgtgcattgagcgtaatgccattgcctctgtgaaggcgattaacgccgcacggatggctctgcgccgcaccagtgcaccgcgcgtctcgctggataaggtcatcgaaacgatgtacgaaaccggtaaggacatgaacgccaaataccgcgaaacctcacgcggtggtctggcaatcaaagtccagtgtgactaatacttcttactcgcccatctgcaacggatgggcgaatttatacccgctttctcgtctgctgtaatattccccactacacttccactgttgcgtcaggcgtttgtcgccatacgcttacagggtggcccgcatgcaaaaagcacaacggatcattaaaacctatcgccgtaatcgaatgattgtttgtacgatttgcgcactcgttacgctcgcttcgaccctgagcgtgcgatttatttcacagcgtaacttaaatcaacaacgggtagtacaattcgccaatcacgctgtagaggaattagataaagtactgcttcccctacaggcaggtagcgaagtcttgcttccgctgattggtctgccctgctctgtcgcccatttgccattacgtaaacaggcggcaaaactccaaactgtgcgatccattggcctggtgcaagacggcacactctattgctccagcatttttggttatcgcaatgtgcccgtcgtggacattctggctgaacttcctgcaccgcaaccacttttacgcctgacgatcgaccgtgccctgattaaaggcagtccggttttgattcaatggacgcctgcagcgggcagtagcaatgctggggtcatggagatgattaacatcgacttactgacggcaatgctccttgagccacaactgccgcaaatcagtagcgccagcctgacggtggacaaacggcatttgctctatggtaatgggctggtagattcccttccgcaacctgaagacaatgaaaactatcaggtttcttcgcaacgctttccttttaccattaacgttaatggtccggggctacggcgctggcatggcactatcttccaacacaattaccgctggcggtgctgctaagtttactggtgggctacatcgcctggctggcgaccgcttaccggatgagcttttcccgcgaaatcaatctgggcctggcgcaacatgagttcgaattgttctgtcagcctttgcttaatgcgcgcagccagcaatgtattggtgtagagattttgctgcgctggaacaatccgcgtcagggctggatttcaccggatgtgtttattcctatcgcggaagaacatcatttaattgtgccactgacccgctatgtgatggcagaaaccattcgtcagcgccatgttttcccgatgagtagtcagtttcatgttggcattaacgtcgcacccagccattttcgccgtggtgtgctgataaaagatctcaatcagtactggtttagcgctcacccgattcagcaactgatcctcgaaatcaccgaacgcgatgccttactggatgttgattatcggattgcccgcgagctacatcgtaaaaacgtcaaactggcgattgatgacttcggcaccggcaacagttcattttcctggcttgaaacattacgtcctgacgtgctgaaaattgataagtcatttaccgcagctataggttctgacgcggttaactcgacggtgaccgatatcatcatcgcgctggggcaaagactgaatattgaactggtggcggagggcgtggaaacgcaagaacaggcgaagtatttgcgccgtcatggcgtgcatattttgcaagggtatttgtacgcacagccgatgccgctacgtgattttcccaaatggctggcgggcagccaaccgccgcccgcccggcataatggacatatcacgcccattatgccgttacgttaatgcttactcatcttcatcgtgcgccggttgctctttaacaatgcgaaccagatcaacacgataatcattggcttcaatgatggtgatatgcagtggccctacatcaatcacatcgcccacacggggaatgtgaccatttgccgagatcacgaggcccgcgaccgtcgcgatatcatcgtcatcggcaaggtgctcaacatcaagcgcctgctgcaaggcatgcaaatctgtaccgccttttaccagccagccgtcaccatcagtaatgatttccggcgtttcgtcagcgtccgggaattcacccgcaatggcttccagcacatccagcggcgtgaccagaccttgtaccacaccaaactcgttggtcacgataacaaagctcccgcgagcacgacgcagcacgcccaacaggttgatcggatcgagggtttccgggacgataatcgccggagacgccgaagcaatcgccgccacatcaacgccctcttccagcgccaccagcagttctttagcacgtacaataccaatgatttcatccagttcaccgcgacataccgggaacagactgtgcggtgaagagagcagttgctcgcggatttcatcgaccccgagattagcgtcaacccagcttatttcaccgcgcggcgtcatgatcccgcgcagagaacgcgacgccagcgtcagtacgccgttaatcatgtaacgttcttcttcggcaaatgcaccttccgggatcggcatcggcatcgggttatcggcatcgtgctgaacattggcctgacgtttcccgcccatcaaacgcaggatggcatcggcagtacgcgctcgcagcggcaaagtcgactggtggcgaataaagttgcgacgcgcaatctggttaaacacttcgatgatgatcgagaagccaatcgcggcatacaggtaacctttcggaatgtggaaaccgaaaccttctgccaccagactcagaccaatcattaacaggaagctcagacagagcaccaccaccgtggggtgctggttaacgaatcgcgtcagcggtttggatgccagcaacataaccgccatcgcaatcactaccgccgccatcatcaccggcagatggttaaccatccctactgcagtaattaccgcatccaacgagaagacggcgtcaaggatgacaatctgtgtgacgaccacccagaaactggcgtagcctttaccgtggccggaatcatgatcgcggttttccagccgttcatgcagttcggttgttgctttgaacagcaagaatatccccccgaacaacataatcaggtcgcgtccggagaaggagaaatccatgacggtaaatagcggtttggtcagcgtgaccatccatgaaatcagcgacagcagccccagacgcataatcagcgccagtgataaccccagcaaacgcgctttatcgcgttgttttggcggcagtttgtcagcaagaatggcgatgaagaccaggttatcgatacccagcacaatttcgagaacaacaagcgtgagtagccccgcccaaattgaggggtccattaagaattccatgacaagctcctgcttaaggaatagctattcgacgccagaaataatgcaggcgtaacgacaaaatgcaaacgaaaggtgcggcatagagagccagaaaggtaggcgttaaaaggcctgatgctgaaatgacgtcggtgacgatccatactgcgggctactgccctatactccatggttgttaaacgggagttaaacatatcagagacgcctctgatttggcaaagatttaccttcctttgcaaacgaatgtgacaaggatattttacctttcgaaatttctgctaatcgaaagttaaattacggatcttcatcacataaaataattttttcgatatctaaaataaatcgcgaaacgcaggggtttttggttgtagcccttatctgaatcgattcgattgtggacgacgattcaaaaatacatctggcacgttgaggtgttaacgataataaaggaggtagcaagtgaccattgctattgttataggcacacatggttgggctgcagagcagttgcttaaaacggcagaaatgctgttaggcgagcaggaaaacgtcggctggatcgatttcgttccaggtgaaaatgccgaaacgctgattgaaaagtacaacgctcagttggcaaaactcgacaccactaaaggcgtgctgtttctcgttgatacatggggaggcagcccgttcaatgctgccagccgcattgtcgtcgacaaagagcattatgaagtcattgcaggcgttaacattccaatgctcgtggaaacgttaatggcccgtgatgatgacccaagctttgatgaactggtggcactggcagtagaaacaggccgtgaaggcgtgaaagctctgaaagccaaaccggttgaaaaagccgcgccagcacccgctgccgcagcaccaaaagcggctccaactccggcaaaaccaatggggccaaacgactacatggttattggccttgcgcgtatcgacgaccgtctgattcacggtcaggtcgccacccgctggaccaaagaaaccaatgtctcccgtattattgttgttagtgatgaagtggctgcggataccgttcgtaagacactgctcacccaggttgcacctccgggcgtaacagcacacgtagttgatgttgccaaaatgattcgcgtctacaacaacccgaaatatgctggcgaacgcgtaatgctgttatttaccaacccaacagatgtagagcgtctcgttgaaggcggcgtgaaaatcacctctgttaacgtcggtggtatggcattccgtcagggtaaaacccaggtgaataacgcggtttcggttgatgaaaaagatatcgaggcgttcaagaaactgaatgcgcgcggtattgagctggaagtccgtaaggtttccaccgatccgaaactgaaaatgatggatctgatcagcaaaatcgataagtaacgtattgtgttgattatcactcagttttcacacttaagtcttacgtaaacaggagaagtacaatggagattaccactcttcaaattgtgctggtatttatcgtagcctgtatcgcaggtatgggatcaatcctcgatgaatttcagtttcaccgtccgctaatcgcgtgtaccctggtgggtatcgttcttggggatatgaaaaccggtattattatcggtggtacgctggaaatgatcgcgctgggctggatgaacatcggtgctgcagttgcgcctgacgccgctctggcttctatcatttctaccattctggttatcgcaggtcatcagagcattggtgcaggtatcgcactggcaatccctctggccgctgcgggccaggtactgaccatcatcgttcgtactattaccgttgctttccagcacgctgcggataaggctgctgataacggcaacctgacagcgatttcctggatccacgtttcttctctgttcctgcaagcaatgcgtgtggctattccggccgtcatcgttgcgctgtctgttggtaccagcgaagtacagaacatgctgaatgcgattccggaagtggtgaccaatggtctgaatatcgccggtggcatgatcgtggtggttggttatgcgatggttatcaacatgatgcgtgctggctacctgatgccgttcttctacctcggcttcgtaaccgcagcattcaccaactttaacctggttgctctgggtgtgattggtactgttatggcagtgctctacatccaacttagcccgaaatacaaccgcgtagccggtgcgcctgctcaggcagctggtaacaacgatctcgataacgaactggactaacaggtgagcgaaatggttgatacaactcaaactaccaccgagaaaaaactcactcaaagtgatattcgtggcgtcttcctgcgttctaacctcttccagggttcatggaacttcgaacgtatgcaggcactgggtttctgcttctctatggtaccggcaattcgtcgcctctaccctgagaacaacgaagctcgtaaacaagctattcgccgtcacctggagttctttaacacccagccgttcgtggctgcgccgattctcggcgtaaccctggcgctggaagaacagcgtgctaatggcgcagagatcgacgacggtgctatcaacggtatcaaagtcggtttgatggggccgctggctggtgtaggcgacccgatcttctggggaaccgtacgtccggtatttgcagcactgggtgccggtatcgcgatgagcggcagcctgttaggtccgctgctgttcttcatcctgtttaacctggtgcgtctggcaacccgttactacggcgtagcgtatggttactccaaaggtatcgatatcgttaaagatatgggtggtggcttcctgcaaaactgacggaaggggcgtctatcctcggcctgtttgtcatgggggcattggttaacaagtggacacatgtcaacatcccgctggttgtctctcgcattactgaccagacgggcaaagaacacgttactactgtccagactattctggaccagttaatgccaggcctggtaccactgctgctgacctttgcttgtatgtggctactgcgcaaaaaagttaacccgctgtggatcatcgttggcttcttcgtcatcggtatcgctggttacgcttgcggcctgctgggactgtaagactgttgtacactaccggggccttttggccccgtttttttatctggaggattaatgacaatcacggacctggtactgattcttttcatcgccgcactcctggccttcgcgatctacgatcagttcatcatgccccgccgtaacggccccaccctgctggcaattcctttgctccggcgtggtcgcatcgatagcgttatcttcgtcggattgattgtcattcttatctataacaacgtcacgaatcatggtgcgttaataacgacatggttattaagcgcactggctctgatgggtttttatatattctggatccgcgttccgaagatcatctttaaacaaaaaggttttttcttcgccaatgtctggattgaatatagccgaatcaaagcgatgaacttgtcggaagatggcgtgttggtgatgcaattagaacagcgtcggctgttaatccgcgttcgaaatatcgacgatctggaaaaaatttataagcttctcgtttcaactcaataagttatgaatttagccaaagctatgtttagtgtatttttaataatcagacatagcttaggctatattacctcttcccttatttgttattnnntttancgnttcattgatatawaaatctaaatgaaaatcgttatcaataaagcaatgaaataatatattccaacagttgttttatattctcaaaatatgttaaggttgcgccctcatttggggagtagccgatttccagattccggaaatgtacgtgtcaacatactcgttgcaaaacgtggcacgtacggactgaatactttcagtcaggcgagaccatatgcacatcaatcgctatgcctgcatgaacgcgaaaaccatcacggcttgttgttcatgtatgcatgtttgctgggggcgatgatgtgttttatggataccccggtcaggacattgtcatgaatatcactgctactgttcttcttgcgtttggtatgtcgatggatgcatttgctgcatcaatcggtaaaggtgccaccctccataaaccgaaattttctgaagcattgcgaaccggccttatttttggtgccgtcgaaaccctgacgccgctgatcggctggggaatgggcatgttagccagccggtttgtccttgaatggaaccactggattgcgtttgtgctgctgatattcctcggcgggcgaatgattattgagggttttcgtggcgcagatgatgaagatgaagagccgcgccgtcggcacggtttctggctactggtaaccaccgcgattgccaccagcctggatgccatggctgtgggtgttggtcttgctttcctgcaggtcaacattatcgcgaccgcattggccattggttgtgcaaccttgattatgtcgacattagggatgatggttggtcgctttatcggctcaattattgggaaaaaagcggaaattctcggcgggctggtgctgatcggcatcggcgtccagatcctctggacgcacttccacggttaataagaacgctgccagaggtgaatattaaagtccgtctggcagtcgaacacttcttttgctgccagtgtttgccagacttctggcttcgcacgccaggcaaacggcgtcatctgcaataatgcgacggcttcatcaccgcgaagacgcatcggataacacaactcatcactctgctgtaatgtaaaaccttccagttgttctgcatgaggtgcatgaagatgtacttcattgtaaatcagccccttcagctccatcaaatgtcgcggtcccggcgtggcagtaatgacccagccgccgggcttcactactcgtgctaattcttctgctttacacggcgcgtaaatacgtattatggcgtccatactggtatcggaaaacggcaaacggtggctggaagcgacacaaagagtgacctgcggatagcgtttcgccgccgcttttatcgctaccttcgagacatccaggccaaacgtggtgatttcgggcaacacatcggcaaatgcgtgtgtgtaatacccttcaccacagccaatatccagcaccgccgtggccttttcatcaagccgttcccgcagttgggcgacaattgcatcacgcagcggctgataatgtccggcatctaagaatgcgcggcgtgcttgtatcatttccgcgctgtcgcccggatcacgagaccgtttatgctgaacgggcagcagattgacatacccttctttcgccatatcaaactgatgtcgctggggacagatatagctgtttttttcacgcgaaagaggctgatggcaaagtggacaggaaaacgacatgacaactccggcaggatactaaaggccgcaagtgtaacgcgaatcacgcggcgggcaaatatccgaacgccaggagcgaagataaagcatagtaaaaagcctcgcattcgacgaggctttatagcgagattgaagcgtattcacacttcagatcagtggattcgatcagatagctgttacgttaacagctgccggacctttctggccgtcctgaatttcgaactcaacgttctgaccttcagccagagttttgaagccattaccctggatagcggagaagtgtacgaacacatctttgctgccatcagccggagtaatgaagccaaaacctttagactcgttgaaccacttaacctgacctttaatctttgccatttgaaaaattccttagattgttttcttcgcccgcaggcataacatagataaaactgacacattactgcatgaggcaccaatataaggctcggcagagaagcggtattcaacgtcaacgtgtttactcaggacttctttactgaaaatgccacacataaacagaactgtacctcgtttaacccgaaatctgttatcacatacaacgttaattatggcaagccatttttaaacatgtctcgatcagacgcacaaatctcgatacgtcttccactttttttgcacacttatgcaacggaatacgcgccgatatatcattgtgcttaaccttgccagttcaggcagatacttaaactggcgtattttctaacatagttcaataagttcagttgttccaggccagtgggagaagttattacatagtgcgtgcaatatcacattttttgctatgcaatgaataaaaagttatatcactttttctcataaaacagtcagttaacggctatcaattaccctaaagagaagtcaatccccaaagggattgaaaatttaaaataagaaaaattgatgaatgagcaaaaaaatcaagagagaaacgtttcgctaataaataataccacgcttaatcacaaatccgatgtaaacatcctaataaattaatgaggaaaatatctttttctgatatcccgttacgcaaataaataatatgataattatttgaagtcagaccagagttttaatttgaagcagttgcaccatggcagtgcgtataatcaggatgaattgagtaacccttcaacgacggggttactcaagattgaggaaggattatcgttcggcgaccagacgaataatatcttcgtcttcaaccgatttttgactctcaacggtctttttatctgctttctcaggttcgtttgcttcgcacaaacgacgtaacagtgcattttgacgtttttgctgatccagcaacgcctcaagcagttcaatctgttcgttagtccgagaactggcacgattgataaaaaaccacaagatgagcccgataagaagaaccaccaccgatacaaccaaagacgcaatgttcatcacgcctgaatttacaacttcgttcatttcaccacctctgagtagaggcgctattctaccactgctggagaggaagaaaatctagtgctgaaaaaatgatatcaccacgggataaactggttaatggcacaaattccgctgaaaaattgtacatcctgatcgcacatcatgttgaatacctgcgcccaaagcagcaagcaagccaacaccacgacaaccagaacgacccatcgaaactttttcactccaatctccgcttcacctaccttatgtcattaaactagcatgcgttagttaaacagcgcctaactatgtcgatattcgtgctttttcggaatgagtagcttgcttcagcgcatattgccgctacgattaagcgaacataaaaagagaagaggttgtaatgcgattcatcattcgcacagttatgctgatagcactggtatggataggattattactcagcggatatggcgttttgattggaagcaaagagaatgccgcaggattaggtttgcaatgtacctatctgactgccagaggcaccagcacggtacaatacttgcacactaaaagtggtttcttggggataacagattgcccactgttacgtaaaagcaatatcgtggtcgataatggttaagggtaataaataaccagattctcactcatgagtaaaatattcttatagcaagcgcgtttaatataacgcaccttcaactttatttttctcatgctaaataaagaacctgtctgtttgatattccgacaggttcttactctcatcagaacggatagtcgtgataacccatttgggcagaaattttgcgcgctgcggtatgcaacattgcgacatattcctgtaaacgctcttcagagaaactgggtgatgctgccaacttactgatttagtgtatgatggtgtttttgaggtgctccagtggcttctgtttctatcagctgtccctcctgttcagctactgacggggtggtgcgtaacggcaaaagcaccgccggacatcagcgctatctctgctctcactgccgtnaaacatggcaactgcagttcacttacaccgcttctcaacccggtacgcaccagaaaatcattgatatggccatgaatggcgttggatgccgggcwactgcccgcattatgggcgttggcctcaacacgattttacgtcacttaaaaaactcaggccgcagtcggtaacctcgcgcatacagccgggcagtgacgtcatcgtctgcgcggaaatggacgaacagtggggatacgtcggggctaaatcgcgccagcgctggctgttttacgcgtatgacaggctccggaagacggttgttgcgcacgtattcggtgaacgcactatggcgacgctggggcgtcttatgagcctgctgtcactctttgacgtggtgatatggatgacggatggctggccgctgtatgaatcccgcctgaagggaaagctgcacgtaatcagcaagcgatatacgcagcgaattgagcggcataacctgaatctgaggcagcacctggcacggctgggacggaagtcagctgtcgttctcaaaatcggtggagctgcatgacaaagtcatcgggcattatctgaacataaaacaytrysacatatwsytgtaaacgctcttcagagaaacgcaacgtcgggaaggagatgctcaaaccggcaatgaccacgccaaagcgatcaaataccggtaccgcaatgcatcgcagcccttcttcctgctcttcgttatcttcgccatacccctgctcgcgcacctggtccagaacgggtaataacgcttctgtactggtgatggtccgctcggtactgcgtttatactccacgccctcaagaatttgcttcacttcatcgagatcgcgccatgccagcagtaccttaccaatcgcggtgctgtacagcggattacgacgcccaatccgtgaatacatgcgcaaattgtacatagagtcaattttgtgaatgtaaacaatactgtcttcgtccagtgcgccgaggtggatagtttctttggtcaggcgggagatctcacgcatctggatatctgcgctacgaattaaatcgacgttttgtaacgcgcgagcgcccagttcaaacaatttcagggtcagggaatatttctccgactccccttcctgcgccacataacctaaggttttcatggtctgtaaaaagcgataaacggtgctttttgacatcatgacgcgctgcgacagctcggttatccctatttcgcgctcttcacccagcgcctgcaaaatgccaaaaacttttagcacggaagatacagaatcaggctgtttatccagatctgcgttagccatttatcacctcattgcgagtgttttataaaaatcagaactgttttttattataatttcgcaccagggtggtcgcaatccatcttttgccggttagttacaattctgcgacatccaccgtgaatatcagtgctagaatcatacccctgttgattattcaccaaagatataaaattcctatgccaaaagttcaggccgacggcctgccattgccccagcgatacggtgcgatattaaccattgtgattggtatttcgatggctgtccttgacggcgcaatcgccaacgtcgccctgccaacaatcgccacggaccttcatgccacgccagccagttccatctgggtagtgaacgcctatcaaatcgccattgtcatctccctgctctcgttttcgtttctgggcgatatgtttggctatcgacgtatttataaatgcggtctggtcgtttttctgttgtcttcactgttctgcgccctttctgattcgctgcaaatgctcacccttgcgcgtgtcatacaaggtttcggcggtgcagcgttgatgagcgttaataccgcacttatccgcctgatctatccacaacgttttctggggagagggatgggcataaactcgtttattgttgccgtctcttctgctgccgggccgacaattgctgcagcaatcctctccatcgcatcctggaaatggttatttttaatcaacgtaccgttaggtattatcgccctgcttctggcgatgcgttttctgccacccaatggttctcgcgccagtaaaccccgtttcgacctgcccagcgccgtgatgaacgcgttaaccttcggcctgcttatcactgcgttgagtggtttcgctcagggcaatcgctgacgttaattgctgcggaactggtggtaatggttgttgttggtattttctttattcgccgccagctttctcttcccgtaccgctgctaccggtggatttactgcgtatcccgctgttttcactttctatttgcacatctgtttgctctttctgcgcacaaatgctggcaatggtttccctgcccttttacctgcaaaccgtgctcgggcgtagtgaagtcgaaacaggtttacttctgacaccgtggccgttagcaacgatggtgatggctccgttggcaggctatttgattgaacgcgtacatgcaggattgctgggtgctctagggttgttcatcatggctgcggggcttttttccctggttctgctgcccgcgtcacctgcggatatcaatattatctggccgatgatcttatgtggcgctggatttggcttgttccagtcacccaataaccacaccattattacctccgctcctcgcgaacgtagcggtggagccagtggcatgttaggaacggctcgtctactgggtcagagtagcggcgcggcactggtggcgctgatgctaaatcagttcggtgataatggtacgcacgtttcgctgatggctgcggctattctggcagtgattgctgcctgtgtcagtggtttacgtatcactcagccacgatccagggcataaaaaaagcgcgtcgatcaggacgcgctttttagtatttacttcatattacttcaggtattcacccgtacgcagagcttcaattcgtttatccagcggcgggtgagtcatgaacaactcactgagcgatttcgacttaccgttaatgcagaaagccatcatgctggttgcttcttgcggttcatagctggttttcaggcgctgcagcgcggcaatcattttctcgcgaccaaccagttttgccgaaccggcatcagcatggaattcacgatgacgcgagaaccacatggtgataatgctcgccagaataccaaacaccagttccagaaccgttgcaaccgcaaagtagatcagcgggttgccgttgctctcttcaccttcatcacgatttccgcccataaaacccgcggcaagctgcgccagaatacgggaaataaagataacgaaggtgttcaccacgccctgaatcagcgtcatggtgaccatatcaccattggcgatgtggctgatttcgtgagcaattaccgcctcggcttcatccgggctcatgttctgcagcaaaccggtgctgacagcaaccagagaggcatcacggcgcgcaccggttgcaaaagcgttgatgtccggcgcatggtagatagccacttgcggcatagcgatccctgcctgacgagcctgggttgctacagtattaaccagccaacgttccctttcgttacgcggttgctcgatcacttccccgccaacagatcgtaatgccatccatttggacatcagaagcgaaacgaaggaaccaccaaaaccgaacagcaaggccatgatcatcagcccctgaacgctgctcgactgtatccctgtcaggctcagtaccagcccgaaaacgaccattacggccaggttcgttagcaggaagagcgcgattcgcatcataattttctttttacctcagtttaacaaaacgcaatatgcgatacccacatcgtatgggttacgcgactattttcaagtctggatagtgcgtaagtcaccagaaagacacaactttacattttgtagcatctgatttacggcatcttgccgctgttaaaaaatcaggcacaatttcttgtgcctgattgatattacttgacgggagcgggttgttccgcgggtctggctttttcaagcttcgccagatcgagtgcgatattcaccgtctcatccagataaggatccggctcctggtaatctttcggtagatcatccagcttcttcaactccggtttaccttcgcgtttaaagcgttcgttcaaacgcgccagacgcgtcgcatcatcttcattattctctttctcacgcacagcgtagttcagagaaacgatattgcgcttgtccttcatagcgttgaagcgcgcgatatccttcatgatgttctggaactcaggatctttcgcgatacgcgcattatgttccttcagcagctccggcccaaaggccgttaaatcgcctgatttcacataagtcgcggcatcaatgctatcccacggcagcgcgttatcttcgaatttctcacccgtttccgtttcttcattacccgtcggcatgatgatgtctggcgttacgcctttacgttgcgtactgccgccgttaacgcgatagaatttctggatcgtgtactgcacagaacccagcgctggccattcaggacgtaacatctgatcgtaaatacggttcaatgaacggtattgctgaacggtgcctttaccaaacgtcggttcacccacaaccagcgcacgaccgtaatcctgcattgccgcggcaaagatttctgaagccgaagcactgaaacggtcaaccagtaccaccagcgggcctttatagaacacctgcccgtcggtatcgctgtcttcacgaaccttgccgttgttatcgcggacctgaacaatgggacccgcaggaataaacagacctgagagcgataccgcttcggtcaacgccccaccgccattgctacgcaggtcgatgatcacactgctgacattctgtttttccagtttctgcagttgaactttgacatcgtctgtcaaacccacatagaagcccggaatatccagcacgccgactttctctttaccgacggtcttcaccgacattttaaccgcgcggtcttcgagacgaatacgttcacgggtcaatgttacagtgcgggtcttggtccctttaccagcaggtaaaatttccagacgaactttactgcccttcggccctttaattaaggcaaccacatcatcaagacgccagccaatcacgtcaaccatcggcttgcctgtttgaccaacaccgacaattttgtcaccaacgctgatagctttactcttcgctgccggaccacctgccaccatcgaattgataacggtgtagtcatcatccatttgcagcactgcgccaataccttccagcgacaaactcatttcagtgttgaactgttcggtattacgcggggaaagatagttggtatgcgggtcgatttcacgcgcaaacgccgtcattgccagcgagaaaacatcttcgctgttggtttgcgccagacgacgaatggcaaatttgtagcggcgtgtcagggtttcacgaatttctttatccgtttttcctgccagcttcaggcttaactcgtcgaatttgactttactgtcccacagcgcgttcaactcagcctcgtttttcggccagggcgctttgctgcggtcaaggttataagtgtcgttgccggtgaaatccatcggcttttccagtaccgacaaagcgtactggtaacgctcaaaacggcgcttttgcgccagattgtagagatcgtagaaaacgtcgagtttgcctgaacgcagttcatcgcctaactcggttttctttttcgcgaactgttcaacatcgcttgccagcagcacgttgtggctgtaatcgagcagattcaggtagcggtcaaagattttggccgaaaatgcctgatcgaggtcgaactggcgataatgagaacgggtgaagcgcgacgttacgcgctcacttaccgtcgcatgctgcgtctcttcctttaataccggaatttgatcagcacgcgtgatatcttctacagcgaaggtctggcctgctattgcaagcaggccagctaacgcggtaagcctaaaaaacatgttcatgcctggcccggcctccgtttcagaacaccaggtgttctgcgcgcacaatcaaagacatacccgaattcagctggacgcggacgccgtctttggtgatttctaatacggtggcatccatcgcgttttgacccgctttcaccttcagggcttgtccgacagtcagagctgaaatgtcagaaaccggggtgtgctgttcttcgcgaggtgcttttactgtttttggcgctttctctaccggcttttgcgcacgaggtttacgttcagcgccttctttgcggcgtggcgtggtcggacgtggcttgcgttcgcggcgcggtgcgtcttctttctcaccagcagctgcggcagcttcgcgttttttcgcttgctgttcagcacgctgtgcctgaacacgcgctttcgcttcttcaagctgcttgcgagcatgctctacatgttgctcgtccagctcaccgcatgggttgccgtcaagatcgacacgcgttgcgccgggtttaacaccgtaaagataacgccagctcgaagtgtagagacgtaaagcggatcgtaattgcgttttgctcaggttcatttccccggcaacacgatcgaccaaatcctgaaaaataccgattttcagcggacgcgcttcaccttccgcactgaaacagtggggaaaacgttcggccagaaacgcgattacttctttactgctattcaacttaggttgattttccatgaaatttcctgattacaacggacgtagccaacaagcgcaggcatgaacaggcgtcattataatgacgctaccagtaaatgctacgttatccgttgattatcctgcgacgctcgcaaagaattttttgtaatccgtcgttgcaagcactttttcaagctgtgccacaagctgacgtaagccttgctcgtcctcgtctgtaaagcgaccgaagacggtactatcgatgtcaagaacaccaataatctgatttttcaccaccagcggcagaacaatttcagaattactcgccgcatcacaggcaatatgcccgtcaaacgcgtgaacatcctcgatacgctgcacttgattgcgggcaaccgcagtgccgcacaccccgcgcccgacgggtatccggacacaggcaattttgccctgaaatggtcctagtaccaatgtatcgtcctcaagcaaataaaaacctgcccagtttacgtcagtgagacgctcgtataacaacgcactggtgttcgcaagcgttgccagaaaactggtttctcccgccatcagcgcgttaaagtcgcgatttaaatccgcgtaaaattctgttttgttcattatataatcacttggttgtcttacctggaactgccagcctattaaaataagcattaaatgcgttaatgctcaagatcattccaatcatgggttaatattaatgttaattcttattacatttggcacgtcatggctcttaacacaccacaaattacgccgacaaaaaagataacagtgagggcaatcggtgaggaactgccgcgtggtgattaccaacgttgcccgcaatgtgacatgctgtttagcctgcccgagataaattctcatcagagtgcctattgtccgcgctgtcaggcaaaaattcgcgacgggcgcgactggtcgctaacgcgcctggcggcaatggctttcaccatgctgttgctgatgccgtttgcctggggcgaaccgctgttgcatatctggctgttaggtattcgtatcgacgccaacgtcatgcaaggcatctggcaaatgaccaaacagggcgatacgataacgggggcgatggtctttttctgcgttattggtgcccccctcattctggtgtcctccatagcatatttatggtttggtaaccgactgggaatgaatttacgtccggtactgctgatgcttgagcgacttaaagagtgggtaatgctggatatctacctggtcggcattggcgttgcttctataaaggtacaggattatgcccatatccaggcgggtgtcggcttgttctcttttgtggcgttggtgattttaacgacggtgacgttgtcacatcttaatgtcgaggagctgtgggagcgattttatccgcagcgccccgctacgcgtagggacgagaaacttcgtgtctgtcttgggtgccattttaccggctatcctgatcagcgtggtcgctgcccgcgttgccatatcccgctacgcctgcgtcgccgtcatagtttgcaaaaatgctgggcggcgctgttagcgtcaatcgttttgttgttacctgccaacctgttgcctatttctatcatttatctgaacggaggacggcaggaagatacaattctttccggaattatgtcgctggcaagtagcaacattgcggttgcgggaatcgtgtttatcgccagtattctggtaccgtttactaaagtgatcgtcatgttcactttactgttgagcattcattttaaatgccagcaaggtttacgcacacgcattctgttactgcggatggtgacctggattggtcgctggtcgatgctcgacctgtttgtcatatctttaaccatgtcgctgattaatcgcgatcagatcctcgcttttactatgggaccggctgcgttttatttcggcgcagcggtaattttgactattcttgctgtggaatggctggacagccgcttactttgggatgcacatgagtcaggaaacgcccgcttcgacgactgaagcgcagattaaaaataaacgccgtatctcacctttctggctgctgcctttcatcgcgctaatgattgccggttggctgatttgggacagttatcaggaccggggtaataccgtcaccatcgactttatgtcggcggatggtattgtcccgggccgtacgcctgttcgttatcagggcgttgaagtcggaacagtgcaggatatcagcctcagcgacgatcttcgtaagattgaagtcaaggtcagcatcaagtccgatatgaaagatgcgctgcgcgaagagactcagttctggctggtgacgccaaaagcatcgttggcaggtgtctccgggctggacgccctcgtcggtggtaactatatcggcatgatgccaggtaaaggtaaagagcaggatcactttgtcgcactcgatacccaaccgaaatatcgactggacaatggcgatctgatgatccacctgcaagccccgatctcggttcgctgaacagcggttcattggtctatttccgcaagatcccggtgggaaaagtctacgactatgccatcaatcccaacaaacaaggcgtggtgattgatgtcctgatcgagcggcgttttaccgatctggtgaaaaaaggtagccgtttctggaacgtttccggcgttgatgccaatgtcagtatcagtggcgcgaaggtgaaactggaaagcctggcggcactggttaacggtgcgattgccttcgattcaccagaagagtcgaaacctgccgaggcggaagatacctttggtctgtatgaagacctcgcccatagccagcgtggcgtaataataaaactggaactgccgagtggggccggattgaccgccgactcgacgccattaatgtatcagggactggaagtcggacagctaactaaactggatttaaatcctggtggtaaagtcactggggaaatgacagttgatcccagcgtcgttaccctgcttcgtgaaaatacccgcatcgaattacgtaatccgaaattatcccttagcgatgccaatctcagcgccctgctgactggcaaaaccttcgagttggtacccggcgatggcgagccacgcaaagagttcgttgttgtgccaggcgaaaaagcactgctgcatgaacctgatgttctgacgctgaccctgaccgcgccggaaagttacggtattgatgctggtcagccgctcattcttcacggcgtgcaggtaggccaggttatcgatcgtaaactcaccagcaaaggcgtcacctttaccgtcgccatcgagcctcagcatcgagaactggtaaaaggcgatagcaaatttgtcgtcaacagccgtgtcgacgtgaaggtggggctggatggcgttgagtttctcggtgccagcgcctcagaatggattaacggcgggatacgtattctgccgggcgataaaggcgagatgaaagccagctatccactgtatgccaatctggaaaaagcgctggagaacagccttagcgatttacccaccacaaccgtgagtttgagtgcagagacgctgccggatgtgcaggcaggatcggtagtgctctaccgtaaatttgaagttggtgaagttattaccgtgcgtccgcgagctaacgcgtttgatatcgatctgcatattaagccggagtatcgcaaccttctgaccagcaatagcgtgttctgggcagaaggcggggcgaaagttcagctgaatggtagtggcctgaccgtacaggcatccccgctctccagagcattaaaaggggctattagcttcgataacctcagtggtgccagcgccagtcagcgtaaaggcgacaaacgtattctgtatgcttccgaaacagcggcccgtgcggttggtgggcagattacgcttcacgctttcgatgccggaaaactggcggtcgggatgccaattcgctatctcggtattgatatcgggcaaatccagacgctggatctgattaccgcgcgcaatgaagtacaggcaaaggcggtgctctatccggaatatgtccagacctttgctcgcggtggtacgcgcttctcagtggtcacaccgcaaatttcggcagctggcgttgagcatctagatactatcctccagccgtatatcaacgtcgaaccaggccggggcaatcctcgccgcgactttgaattacaagaggccaccattactgattcgcgttacctggatggcttaagcattattgttgaagcgccggaagccggttcgttaggtattggtacgcctgtgctgttccgtggtctggaagtcggtacggttacaggaatgacgctggggacattgtcagatcgcgtgatgattgcgatgcgcatcagtaaacgctatcaacacctggtgcgtaacaattccgtcttctggttggcatcgggttacagtctggactttggtctgacgggcggcgtagtgaaaaccggcacctttaaccagtttatccgtggcggcatcgccttcgccacgcctccgggtacgccactggcaccgaaagcccaggaaggcaaacacttcctgttgcaggaaagtgaaccgaaagagtggcgtgaatggggaactgcgcttcccaaataatgcccactgctccggcgtgcctgcgccggagcgtttatgctaaactgcgcgcctgtttttttgccagtggtacatgctcgtggcccaacacaccgtttatttcccggacgcctttctgacacaaatgcgcgaagcgatgccttcgacgctctcatttgatgattttcttgccgcctgtcagcgcccgttgcgccgcagcattcgcgttaatacgctgaaaatctccgttgctgatttcctgcaattaaccgctccttatggctggacgcttacgccaattccgtggtgtgaagaaggtttctggattgaacgcgacaatgaagatgcattgccattgggtagtaccgccgagcatttaagcggcctgttttatatccaggaagccagttcaatgttgcccgttgccgccttgtttgctgacgataatgcaccacagcgggtgatggatgtcgcagctgcgccaggctccaaaacgacgcaaattgccgcgcggatgaataacgaaggggcaatccttgccaatgagttttccgccagtcgggtaaaagtgttacatgccaatatcagccgctgtggcatcagtaatgttgcgctcacacattttgatggccgcgtgtttggtgcggcagtgccagaaatgttcgatgccattttgctggacgctccctgctctggcgaaggcgtggtgcgtaaagatcccgatgcgctaaaaaactggtcaccagaaagcaatcaggaaatcgcagctacacaacgggagcttatcgacagcgcctttcatgcattacgtcctggtggtacgctggtttactcgacctgtaccttaaaccaggaagaaaacgaagccgtttgcctgtggctgaaagagacttaccccgacgcagtagagtttttaccacttggcgatctcttccctggtgcaaacaaagcgctgaccgaagaaggctttttgcatgttttcccacaaatttacgactgcgaaggcttcttcgttgctcgtctgcgtaaaactcaggcgatccccgccttacccgcccccaaatacaaagtcggtaatttcccgttcagcccggtgaaagatcgcgaagccggacaaattcgtcaggcggctgcaagtgttggcttaaactgggatggaaacctgcgactctggcaacgcgacaaagaactgtggttgttcccggtgggcattgaagccctgatcggtaaagtccgattttctcgcttggggattaaacttgccgaaacgcacaacaaaggttatcgctggcagcatgaagcagttattgcccttgccacccccgacaatgtgaacgcttttgaactgacaccgcaggaagcggaggagtggtatcgcgggcgcgatgtttacccgcaagccgcgccagtggcggatgacgtgttggttactttccagcatcaaccgattggtttagccaaacggattggttcgcgattgaaaaacagctatccgcgtgaactggtgcgcgatgggaaactttttaccggtaacgcctgacagcgcacaaaaaaagcgcactttttgactggcacattcggctgcctcaactaggctgaaaaatggtgcgatcggactggtcgtaccacaaccggcagctaaatggagagcacgaagatgaaaaccagtgtgcgcataggcgcttttgaaatcgacgacggcgaattacacggtgaatcgccgggtgatcgaacgttaaccattccttgtaaatctgaccccgatttatgtatgcaactcgatgcctgggatgctgaaaccagtatccctgccctgctaaatggcgaacactctgtcctttaccgtacccgttacgatcaacaatctgatgcctggattatgcgtcttgcctgatccaaaaagaacccgtcggcatggcgggttatttgtcctggttattcccccgttgtaaaatctctcctaaacttaacggtacggcaccacacttcggggatgaaatgttcgcgctggtactttttgtttgctacctggatggcggttgtgaagatattgttgtggatgtctacaacacggaacagcagtgtctttattctatgagcgatcaacggatccgccatggcggttgttttccgattgaggattttatagatggtttctggcgaccagcacaggagtatggtgatttttaattattgcaattgcacaagagtcagttcgcccccaaagacagcaccggtatcaatataatgcaggttgccaatatccacgcgatgtcgcaacggtgtatgaccaaaccagaaatgatcagcacctgtaattccctgccctttttggcgttcacctaatcgcgagcggctccacaagacctgatgcaaatcaacgtccttttgccattcataaacatcatctggataatcggcatgagcaataacatgtttgccggtacgactgtgtacttcaagaataaagggcaaatgctgacatttttccagcgccgttttcgcttgtttctgttgattatctgccagcgcaataaaccagtcgccgccattcatcaaccacaaagacatctgctgggatgccagcgcatccatcgccatctgttcatgattgcctcttaccgcacgaacccaatgttgttccagtaactgcaggcaacgtaaactttgcggcccacgatcgataacgtctcccactgagataagtaaatctcgccacggatcaaaaccacaatgccataatttgcggcgcaactgctcaagacaaccgtgtatatcgccagaaagccagatatgtcgccattgatgacccgcaattctctgataaacgggcgcaggctgtttcatcaatattttcctcccgcgctaaagatcacataatcttaacaagaatgttaaaaaacgctggactcagacagtagagtgtgtgttatggttgactataaagtcagcgaaggaaatgcttctggcttttaacagataaaaagagaccgaacacgattcctgtattcggtccagggaaatggctcttgggagagagccgtgcgctaaaagttggcattaatgcaggcttagttgccttgccctttaagaatagatgacgacgccaggttttccagtttgcgtgcaaaatggtcaataaaaagcgtggtggtcatcagctgaaatgttaaaaaccgcccgttctggtgaaagaactgaggcggtttttttattggaaatcaaaaggctattttaggtaattaacagagtttttcagctcgttctataaacggtgccagactcattttttcgccgggattgttaggatcatcaatctgaatcaccgaaatgggttgggctttagtcttcccactggcaacttccttttgtgcgatatcgtttaaaggatactgcacgagggtacttgggttgatgacatacaaagcattacccggtcggcaagtcagcatcacctcttcgcgattaaacgcccatttgtctttacccacttcaaaacggctgacggtaatcacctgcggtgcagccagcgccgctgcagaactggtgagtaacagaaacgccagaatacttttttcatcattttcgtaatccatcaaaaaggttcgagagtcgcaagcaggctgatgatcaccagcactaccgcacctatcgcccattcgagtttagtcatccactcaaaccagggtgccgcacgatcttcatcctgcctcatgcgcggtacaagaacataacgattagccagcgcaatgaccaccataatcatcaccaggatggctttgagcaataagagttggccccagtaagtcgtaagcgtggggggaaatccggtaatcaacaatgcattaagcacgccgcttgccagtacgccgatcaccgcaaaatgcccgcaccaggaaaaacgcatcagcgcctgaatggcctggtgtcgccaacggcctttgatgagttgcatacaccagagcaccggcagtaatcccccaaaccacgccgccgcacaaatcaggtgaatcgcgtgattagtctgatggatttcgccgttaccccttcattcagcgtcgcatgcccgattcccgccagcagaataaattgcgcggtagtgagcataaacagcaaacgtggcatattccgcggttgcataagggcgacgatcaacgttacgagggcgagaacaatttgccataaccagacgccaccaaactgcgtttgcaaaacagcctgccaaatgtttggcgaaaatacatctgcccatcccgttcccatcaacccgccctgaacggcgagcattgcagtggcactgatcaaactccagacggcagcgtgctgttgtaaacgcagaaaacgcttcgccagcaagcgacgaatcgttaagggggccagccaggcaccgtacattgcgaagccaaagaccagcatcagcgaggtgaaatggataaatcgcagcgcgatccaggtaaacgccagcatgatttatttcacgctaaaggtgtagtgtcctttcgttttatgcccgtccaccgaaacaacatgccagtcaacgatgtaggttccgggtttcagcgaatcggccagtggaacaatcagttgcttttggtcctgctcatttcgcttcgccggtaatgttttaatattttcgttttttggccccgtgatttttgcaccactgaatcctgtttcaacaccttccgagaagtttaaagtgattgcctgcggtgcagctgtcacttgcgcgtttgccgcaggatactgatgcgttaaatgcgcatgtgcccagacggaaggtgtcaccaacgaagtggtcaggattgccagcgcgtagcgaagggagcgtgcagttgaagtcatattatctattcctttttgtaataacttttttacagagcataaccttgtctaatgtctgagtcgaggatcatcaattccggcttgccatcctggctcactcttagtaacttttgcccgcgaatgatgaggagattaagaatgctgaagaatctggctaaactggatcaaacagaaatggataaagtgaatgtcgatttggcggcggccggggtggcatttaaagaacgctacaatatgccggtgatcgctgaagcggttgaacgtgaacagcctgaacatttgcgcagctggtttcgcgagcggcttattgcccaccgtttggcttcggtcaatctgtcacgtttaccttacgagcccaaacttaaataaaacttatacagagttacactttcttacataacgcctgctaaattatgagtattttctaaaccgcacccataatttgcagtcattttgaaaaggaagtcattatgtcgttctggaaagttgcagcagcgcaatatgagcctcgtaaaacctcactcaccgaacaggtagctcatcatctggagtttgtgagggccgccgccaggcaacaatgtcagctgttagtttttccatcgctttctttactggggtgtgattattcgcgacgtgcccttcctgccccacccgatctctcactgttagacccgctttgttatgccgcaacgacctggcgaatgaccatcattgccggccttcccgttgaatataacgatcgctttattcgtggaattgcggtgttcgcaccgtggcgaaaaacgcctgggatctaccatcagagtcatggtgcatgtctgggccgtcgttccagaaccatcacggtggtcgatgaacaaccgcaaggtatggatatggacccgacctgttcactgtttactacagggcaatgtctgggagaacccgacctgctggcgtcggcccgtcgcttacaatttttttcacatcagtactcgattgccgtgctgatggcaaatgcccgtggtaacagtgcactatgggatgaatatggtcgtctcatcgttcgcgccgatcgtggttcattattgttagtcggtcagcgttcatcacagggttggcaaggcgatatcattccattacgctaggctttttcggcctggagcatgccatgttgcgcattatcgatacagaaacctgcggtttgcagggagggatcgttgagattgcctctgttgatgtcattgacggaaaatcgtcaaccccatgagccacctggtgcgccccgatcgtcctattagtccacaagcgatggcgattcatcgcatcaccgaagccatggtcgccgataaaccgtggattgaagatgtgatcccacactattacggtagtgaatggtatgtcgcgcataacgccagctttgaccgccgcgtactgcctgagatgcccggtgagtggatttgcactatgaaactggcccgtcgtttgtggcctgggatcaagtacagcaatatggcgttatataaaacacgcaagctcaatgtacagacgccgccgggcctgcatcatcaccgcgcgttgtatgactgttatatcaccgccgcgttgcttatcgatattatgaacacctccggctggacggcagaacagatggccgatatcaccggacgtccgtcgttgatgacgaccttcacctttggcaaataccgtggcaaagcggtttccgacgttgccgaacgcgatccgggctatctgcgctggttatttaataacctggacagcatgagcccggagctgcgtttaacactgaaacattatctggaaaatacttagtccgcaggcgtagcgggtaatgttccctgcgccagcgcgaccagaaaagcatattccatcgctacgccttcgtacgatttaaagcgaccagatttaccgccatggcctgagtccatgtcggtacagagcaataaaagatggtcatcggttttcagctcgcgcaatttagcgacccattttgccggttcccaatattgcacctgagaatcgtgcaaaccggtcgttaccagtaaatgcggataagcctgtgcggtgacgttgtcatacgggctgtagcttttcatgtactcgtaatattgcggatcctgcgggttaccccactcttcaaactcaccagtggtaagaggaattgattcatcaagcatcgttgttacaacatcaacaaacggtacctgggcgataacgccgtggaataattccgggcgttgattaattgcaacgcccatcaacatgccccccgcactcccgcccatcgcataacaaagcgaaggagagccatagcccagttttaacaatgcatcgcaggcatcaagataatcattaaacgtatttttcttcttcagaaattttccgtcttcgtaccattgttgccccagctcaccaccgccgcgaacatggacaatggcgtagacaaagccacgatctaacaaactcaagcggctaaaactgaaatcggcatcaatacttgcgccgtaagaaccatagccatacaccagcaacgggttgtgtcctttgcgaaaatgtttgcgatggtagaccaacgaaaccggaacttcgacgccatcacgggcgactatccacaggtgttcactgcggtaattcgccgcatcaaaaccgggcacttctgtttgttttaatacacgacgctcaccggtatccatatccagttcaaacaaagtgtctggtgtggtcatggaagaataaccataacgcaatcgcgcggtttcaggttctggattgtaggcaatccaggtcacataggctggatcatcaaaggcaataccaatgacttcccgggtcttgcggttaatttggcgcaaactggttaacccgcgctgacgctcttcaaccaccagccagtcggtaaacagcgtaaacccttccagcatgatgttttcgcgtggcggaattaactcttcccactgttgctcatcacgcatacgggtacggtataagccaaagtttttgccgtggcggttggaacgcagataaaaacgatgctggtagtgatcaaggctgtattcgtgatctttgcggcgcggcagaaaaacaaacggctcggcatcggccatttccgcgtccagcaggcgaacttcactggtggtggcgctggccaaatgaatgactacatagtgcttcgaggtcgttttatgcaggctgacgtaataggtatcgtctttttcttcgtagatcagtttatcttgcgatgctggcgtaccgatggcgtgacgccagacctgataaggcagcagcgtcaccggatgcttgcgaacatagtagaaagtccaggagtcatttgcccagacaaagctgggttcaacgttatccagcagttccgggtaccagttaccagtttccagattacgaaaacgaatgccgtactggcgtcgggaaagaaaatcttctgccagcgccataatggtgttatcgggcgtaatcgccattccgcccatcgaataaaactcactatgagctgcgcgcttattggcatcgagcaatgtttcccactcatcccactcttcactgaatgccgattgacgctggtagatagcatattcacagcctggttcataaatatgccgatagcggtagccatttttgatgtagggcgcagaaacttctcgttgcggaatgcggtcgatgatttcctttaagatgcgatcctgcaaggcttgttgtgaggccatcacccgatgaccgtaactattttcttgttgcaggtagtccaggacttctggctgagaacgcgtatcgtcccgcagccagtagtaattatcgatgcgcgtatcgccatgaagcgtcatggcgtggggaatgcgggcggcttttggtagcatgttattgttctttctggttgaaacatcttataagggtggcaaaactcaccggggatgcaagcgaaacaggggagtcattgcttagatgatgacaggtaatggcgcggatatcgaatgttatgcagacagagaaaatcagcctgttcaaatggctgtgcgattctggatagcccgaaatagtcaacttcaggctatccagagagcggaattattccgccaaagtgcgtttttgctgttcgagatcgcgttcaatgccgtcacgaacatcctgggggattttcagcgcgtcacccagtgcattcaggtaactgcgttccataaaatggtcaatatcaatagccgcgcaactcaggaaatagatttccagcgcctcttcttcattgcggaccccggtagccaggcgttgtggatccagcggttgttcgattgcctgctcaatgagtacacgcccctgctcttccacgccggcttcacgcaattgctggtcgattgccgcacgttctttggcatcaatatgaccatcacttttagcggcaaagaccagcgcaaggatcaaacgttctgtacgctcatccagcggcgtactttgcgcgccaaactgcggttcgtcctgatgcgccgcgcgaattttatctttgtatttattccacagcaccgtacccgctaccgctccgccgccaaccagtaacgcgttggtgccatatttcgtaagaagtttacgtgctgatttatttgcgaccagcagcccagccagtccgcctaatgcgcctggcactaacagtttgcccaatccctgatccgcagacgaggaggtagaagaactgctttgcccaagcagggattgcagttgatttaaccagttagccatatttgctcctcaataaccatttttagtgcctgtagcatagcggatgaggatgtcagaaaatgtatatcgagacaaaagatgcgcaaataagcggggcggtaggccgttattcaaagaaattcgcgccaggtaaggtatttactgtatatcaggtgataagggtattttaggtgaaagtagtttgtcgttttgagtggcattgtttgatgctgattgcccgatgcgacgctgttgcgtcttctcaggcctacgattgtggtgcgttctggggcggacaaggcactcgcgccgcatccgccaacggtcaatcgaattatcagaagccattaacgccgctgatattccgccattcccgctttgcagtccacgctgacctggtaatgaatatcggcacttttaccacgcacggttagcggtactgaccatttatcatctttaccctgaatgtcctgcaaactgacccaagccacgggatcggcctgaccgacaattttttgatcatctgcccagcgcgccacgcgattttgttgataatcacgttttacgctcgcggcaattccggcagcatccagaccttcacactttgggaaagtgaccgacttgctggtttcattattggcagcgaaaactgatgcgcaggcagaaaccaacaacagccctaaaaacgcccctctttttttcatgtttttctccatagcacaatgattcaggagaaagcatggtacaaattgtcaggagcgcaagttgcttcaggccgcgtgtgaggcatcttcctcttcggattcagcaccgacgacctgtggggacggtaatttgccggttttcagaatggtgctcagcacatctttttgttctgccagccatagcgaaagggcttcacgttgctcgtcttccatttgcactggagaatttgtcagccaggtgtcaagcagatccgccgtatcaagcattttatcataagcatcggcttcctttttgctggtaaacgacattttctcttcgccctcacgaatgactacgtatttaacttcaaccgccatttgcagcctctcataataactgtgattttatacagtatatttcttttcggttgagaaatcaacatcagcaataaagacacacgcaaacgttttcgtttatactgcgcgcggaattaatcaggggatattcgttatgacgttattaggcactgcgctgcgtccggcagcaactcgcgtgatgttattaggctccggtgaactgggtaaagaagtggcaatcgagtgtcagcgtctcggcgtagaggtgattgccgtcgatcgctatgccgacgcaccagccatgcatgtcgcgcatcgctcccatgtcattaatatgcttgatggtgatgcattacgccgtgtggttgaactggaaaaaccacattatatcgtgccggagatcgaagctattgccaccgatatgctgatccaacttgaagaggaaggactgaatgttgtcccctgcgctcgcgcaacgaaattaacgatgaatcgcgagggtatccgtcgcctggcggcagaagagctgcagctgcccacttccacttatcgttttgccgatagcgaaagccttttccgcgaggcggttgccgccattggctatccctgcattgtaaaaccggtgatgagctcttccggcaaggggcagacgtttattcgttctgcagagcaacttgctcaggcatgggaatacgctcagcaaggcggtcgcgccggagcgggccgcgtaattgttgaaggcgtcgttaagtttgacttcgaaattaccctgctaaccgtcagcgcggtggatggcgtccatttctgtgcaccagtaggtcatcgccaggaagatggcgactaccgtgaatcctggcaaccacagcaaatgagcccgcttgcccttgaacgtgcgcaggagattgcccgtaaagtggtgctggcactgggcggttatggtctgtttggtgtcgagctgtttgtctgtggtgatgaggtgattttcagtgaggtctcccctcgtccacatgataccgggatggtgacgttaatttctcaagatctctcagagtttgccctgcatgtacgtgccttcctcggacttcctgttggcgggatccgtcagtatggtcctgcagcttctgccgttattctgccacaactgaccagtcagaatgtcacgtttgataatgtgcagaatgccgtaggcgcagatttgcagattcgtttatttggtaagccggaaattgatggcagccgtcgtctgggtgttgcgctggcgaccgctgagagtgttgttgacgccattgaacgcgcgaagcacgccgccggacaggtaaaagtacagggttaaacccggcaaaaaaacgctacaaaaatgcccgatcgtagatcgggcgttttgacttttacagcttagcgccttctacagcttcacgcgccagcttagtaatgcggtcgtaatcgcccgcttccagcgcatctgccggaaccagccaggaaccaccgatgcacagcacgcttttcagcgccaggtagtcacggtagttagccggagaaataccacccgtcgggcagaaacggacctgggagaacggacccgcgatcgcctgcagggctttcacgccgccgttagcttcagccgggaagaatttgaactctttcaaaccgtagtccatacccagcatcagttcggaaacagtgctgatccccggaattagaggaatagtcccttcggtagcagctttcagcagcggctcggtcagacccgggctaattgcgaactgtgcacccgcttcagtgacttctgccagctgctgtggattcagcaccgtaccggcacccacaatcgcttcaggcacttctttggcgatagcacggatagcgtcaactgcacactcggtacgcagagtcacttccagaacgcgcaccccaccagcaaccaacgcttttgccatcggcactgcgtgttccagtttttttaccacgataaccggtacaaccgggccggtggtcaggattgattctgcacttgttttccagtttttcatcagagttttctctcgcctgattacaaatttgtcgtcttaaaaagtgatacaggttgcgccctgttcggcaccggacagtttttcacgcaaggcgctgaataattcacgtcctgtccccacgcgtgacgcgctcaggtcaggaatgtgcggttcgcgagcagccagttccgcttcgtctaccagcagcgtcagttcgcctgtctgtccattcacacgaatgatgtccccgtcgcgcacttttgccagcagcccgccatcgtaggcttctggtgttacgtggatagctgacggcactttacctgaagcgccggagagtcgtccatcggtaactaacgcaattttgaaacaccggtccaataatacaccaagtggcggcatgagtttatgtaattctggcattccgttcgcttttggcccctgatgacggacaacaacgacacaatcgcggtccagcaaacccgcttcaaaggccggcataacgtcatgctggctttcaaaaacaaccgctggcgcttcaatcacctggttctcaaccggcacggcagaggttttcataaccgcacggcccaggttaccgcttaacacttttgtcccaccatgatgagagaaaggttgttcgaaggaagcgatcacattgctgtcgagtgatttttccgccccttcccgccagtccagttcaccattattcagccatggttcaagggtataacgagacagaccaaagcctgccaccgtattgacatcttcatgcagcaggcctgctttgagcagttcacgcaccagaaccggtacgccacctgccgcctggaagtggttaatatcggccggaccgttcgggtagagacgtgccatcagcggtacaacatcagaaaggtcggagaagtcatcccagttaatctgaataccggccgcgcgcgccatcgccaccaggtgcatggtgtggttagtggaaccaccggtcgccagcagagcaacaataccgttcaccaccactttctcatcgatcatcttaccgatcggcatccattcattgccattaccggtcatgcgtgtaacctgacgcgcagcggcagcggtcaaagcatcgcgcagcggagaatccggatgaacaaaagaagagcctggcaactgcatccccataaattccaccaccatctggttggtgttggcagtaccgtagaaagtacatgttcccggcgcgtgataagacgcggcttctgactccagtaaggccatgcggtccactttaccttcggcataaagctggcgaatacgcactttttctttatttggcaaaccgcttgccatcggtccagacggcacaaacaccgcaggcaaatgaccaaacgacagggctgccatcgtcagacccgggacaatcttgtcgcacacaccgaggaacagagcaccatcaaacatgttatgggacagcccgaccgccgcagacatcgctatcacttcgcggcttagcagcgacaattccattccatcctgcccctgggtgacaccatcacacatcgccggaacaccgcccgcaacctgaccaaccgcattcgcttcatgcagggctttacgaatgatttctggatagtgttcataaggctggtgcgcggagagcatgtcgttataggaggtgatgatggcgatattgttacgcaacatgcttttcaaagaggctttgtcttctggctggcaggcagcgaaaccgtgtgccaggttaccgcatgccaactgcgaacgatgaacggtcgaagttttcgcttgttctatccgggcgagataagcagagcgagtctcgcgcgaacgttcaatgattcgatttgttacgcgtaacaattgtggattcataaaggctcctgaaattgagttgtcagagcaggatgattcacaacgcgtttcattcagaggatttatgactgaaacgcctgtaaccggagctcatagggcaaaaacgtttcagtcagtgtaataaaaaaagcctcgtgggtgaatccgcacgaggcctgaaagtgtaaaaattgttctacaatctgtgcaagatcatgttaccggtaaaataaccataaaggataagcgcagatattactcaaactcattccaggaacgaccatcacgggtaatcatcgccaccgaggcaacgggtccccaggttccggcctgatacggtttcggcgcatcattgtccatcgcccacgcctcagtaatggagtctacccatttccaggcttcttccacttcatcacgacgtacaaacagtgcctgaataccacgcatggtttccagcagcagacgttcataggcatccgccagatgcgtctgattaaaggtttctgaatagctcagatccagcttggtgatttgcaggttatgtttgtggtcaaggccaggaactttattcagtacctggatatccacgccttcatcaggttgcagacggatagtcagtttattctgcggcagatcctgccacgactctttaaacagattcagttcaggtgttttgaaatagaccacgacttcagaacatttggtcggcagacgtttaccagtacgcaggtagaatggcacaccggcccagcgccagttatcaatgtcgacgcggatcgccacgaaggtttctgtattgctgctcttgttcgcgccctcttcttccagatatcccggcacttttttgccctgggcgaagcccgcagtatattgcccgcgtacggttttttcgcgtacgttggagcggtcgatgcggcgcagggacttcagtactttcactttttcatcgcggatgctgtctgcgctcaggtcagatggcggagacatcgcaatcatgcagagaatttgtagcaggtggttctgaatcatgtcacgcatctgaccggctttatcaaaatagccccagcgcccttcgatccccacttcttctgccacggtaatctcaacatgatcaatggtgcgattgtcccagttattcacaaacagggagttagcaaaacgcagcgccaacaggttcagcaccgtttctttaccaagatagtggtcgatacggtaaacctggcactcctcgaagtattcgccaacctgatcattgatttcctgcgaggtcgccagcgacgtccccagcggtttctccatgactacgcgtgccggtttagcattcagttttgcctcgccaagccctttgcaaattgcgccaaaagtgctgggcggcatggcaaagtagttaatggtgatacgatttttttgatccagcatcgcgccgagacggttgaatgcagcagtgtcattgacatcgagattacaaaaatccagacgtgcactcagggtgtcccataaaccttcatcaatggtttctttcatgaaagtttcgagcgcctcgcggacaactttggtatatgccgctttatcccagtcagcacgccctacgccgataatccgggtgtccgggttgagctgaccggctttttccagttgatacagggaaggcagcaatttacgacgcgcaaggtcgcctttcgcgccgaaaatgaccaggtcacaggcctgggctgtttgcgttaccgccatgtcattctccttaagttaactaacccggtacttaagccagggtatacttgtaattttcttacggtgcactgtactgcttttacgagcttgcgaaaactgtaaacgcttatccacccgtgcgattacgggaaaagcgcgcaaagtgcggcaaaactgataaaaaaatcatcgttttccattcggtaaaaatctgacactgatcatgttatgaaaaaaaataacaacttttttatctgcttttgtcattaacacggcacacaggcgtaatatctgacaaaactgcatttcgatttctttcagtgcggaaatcgtcattacccgtgagtctctttacatcatgaatatgctggaaaaaatccagtctcagctggaacatttgagcaaatcagagcgcaaagttgccgaggtcattctggcttcgcccgataacgcgatccattcgagtattgctgctatggcactggaagccaatgttagcgaaccgacggtgaatcgtttctgtcgcagcatggacacgcgcggttttcctgattttaaacttcatctggcacagagtctggcgaatggcactccctatgttaatcgcaatgtcaatgaagatgacagcgttgaatcatacacagggaaaatatttgagtccgcaatggcaacgcttgatcatgtccgtcattcactggataaatctgccatcaaccgcgccgtcgacttgctcactcaggcaaaaaaaatcgcctttttcggattaggctcttcagccgccgttgcccacgatgcgatgaataagttctttcgttttaatgttccggtggtgtactccgatgatatcgtgctgcaacgcatgagttgtatgaattgtagcgacggagacgtggtggtgctgatttctcacactggaagaacaaaaaatctggtcgagctggcgcagctggctcgcgaaaacgacgcaatggtgattgccctcacctctgcgggtaccccgctcgcccgggaagcaacgctggcaattaccctcgacgtaccggaagatactgacatttatatgcccatggtttctcgacttgcacagctgaccgtgatagatgtgctggcgacaggatttactttgcgacgcggtgcaaaattcagagataacttgaagcgggtcaaggaagcgctgaaggaatcgcgttttgataagcagttacttaatttaagtgacgatcgctaaaaacgactgtcactgtcctaatcttatacgacatccgaatgagattaatttatcgccatcgcggcgttatttcattcggatttcatgttcaagcaacacctggttgtttcagtcaacggagtattacatgtccagaaggcttcgcagaacaaaaatcgttaccacgttaggcccagcaacagatcgcgataataatcttgaaaaagttatcgcggcgggtgccaacgttgtacgtatgaacttttctcacggctcgcctgaagatcacaaaatgcgcgcggataaagttcgtgagattgccgcaagactggggcgtcatgtggctattctgggtgacctccaggggcccaaaatccgtgtatccacctttaaagaaggcaaagttttcctcaatattggggataaattcctgctcgacgccaacctgggtaaaggtgaaggcgacaaagaaaaagtcggtatcgactacaaaggcctgcctgctgacgttgtgcctggcgacatcctgctgctggacgatggtcgcgttcagttaaaagtactggaagttcagggcatgaaagtgttcaccgaagtgaccgtcggtggtcccctctccaacaataaaggtatcaacaaacttggcggcggtttgtcggctgaagcgctgaccgaaaaagacaaagcagacattaagactgcggcgttgattggcgtagattacctggctgtctccttcccacgctgtggcgaagatctgaactatgcccgtcggctggcacgcgatgcaggatgtgatgcgaaaattgttgccaaggttgaacgtgcggaagccgtttgcagccaggatgcaatggatgacatcatcctcgcctctgacgtggtaatggttgcacgtggcgacctcggtgtggaaattggcgacccggaactggtcggcattcagaaagcgttaatccgtcgtgcgcgtcagctaaaccgagcggtaatcacggcgacccagatgatggagtcaatgattactaacccgatgccgacgcgtgcagaagtcatggacgtagcaaacgccgttctggatggtactgacgctgtgatgctgtctgcagaaactgccgctgggcagtatccgtcagaaactgttgcagccatggcgcgcgtttgcctgggtgcggaaaaaatcccgagcatcaacgtttctaaacaccgtctggacgttcagttcgacaatgtggaagaagctattgccatgtcagcaatgtacgcagctaaccacctgaaaggcgttacggcgatcattaccatgaccgaatcgggtcgtaccgcgctgatgacctcccgtatcagctctggtctaccaattttcgccatgtcgcgccatgaacgtacgctgaacctgactgctctctatcgtggcgttacgccggtgcactttgatagcgctaatgacggcgtagcagctgccagcgaagcggttaatctgctgcgcgataaaggttacttgatgtctggtgacctggtgattgtcacccagggcgacgtgatgagtaccgtgggttctactaataccacgcgtattttaacggtagagtaagtacgttgccggatgcggcgaaaacgccacatccggcctacagttcaatgatagttcaacagatttcgaatattctgaagcaaacttgaacttatcatcaggcgaaggcctctcctcgcgagaggcttttttatttgatgggataaagatctttgcgcttatacggctggatttcgcccggtttgcgagttttcagcaattttagtatccaggtgtattgttctggtcgcggaccaacaaaaatctcgacttcttcattcatccgccgcgcaatcgtatgatcatccgcctctaacagatcatccatcggtgggcgcacctgaatcgtcagacgatgcgtcttgccatcataaatcggaaacagcggtacaacgcgcgcacggcacactttcatcaaacgaccaatcgcgggcaacgtcgctttataggtggcaaagaaatccacaaattcgctgtgctctgggccatgatcctgatcgggtaaataatatccccagtacccctgacgtaccgactggatgaatggtttaataccgtcatttctcgcatgcagacgaccgccaaagcgacgacgcaccgtgttccagacataatcaaaaaccgggttgccctgattatggaacatcgctgccattttctgcccttgcgaggccatcagcatggcaggaatatcgacggcccaaccgtgcggcaccagaaagataactttctcgttattacgcctcatctcttcgatgatctccagcccttgccagtcaacgcgcggctgaattttctccggtccgcgtattgccaactcagccatcattgccatcgcttgcggcgcggtggcaaacatctcatcaacaatcgcttcgcgttcagcttcactacgttctggaaagcagagcgacagattgattaacgcacgacggcgtgagcttttcccagtcgtccggcaaaacgtcccagccgtgccagaatgggatcacggaactttggcggcgttaaagcgatacccgccatcgctgctacgcccagccatgctccccagtagcgcgggtggcgaaaggatttatcaaactcaggaatgtattcgctattattttttttcgtttccatgcttttccagtttcggataaggcaaaaatcaatctggtgatagtgtagcggcgcaacttgccccgcaccaaataaaaaaagccggtactgactgcgtaccggctgcgaatggatgttaattaatcaaaccgtagctgcggcacaatctctttggcctgcgccaggaattcgcgacgatcggagccggtcagcccttcggtacgcggcagttttgccgtcagcgggtttacggcctgctggtttatccatacttcatagtgcagatgtggcccggttgaacgtccggtattaccggaaagcgcgatacggtcgccacgtttcaccttctgtcccggtttcaccagaatcttgcgcaagtgcatataacgcgtggtgtagctgcgaccatgacgaatagccacataataacctgctgcgccactgcgtttggcaaccaccacttcaccgtcacccactgaaagcactggcgtaccctgcggcatggcgaaatcaacacctctgtgtggtgcaacgcgaccggtcacaggattagtacgacgcgggttaaagttagacgagatacggaactgtttcgccgtcgggaatcgcaagaatcctttcgccagaccagtaccgttacgatcgtagaatttgccatcttcagcgcggatagcgtaataatctttaccttctgaacgcaaacgtacgcccagcagctggctttgctcacgtttaccatcaagcatttctcgagacattaataccgcaaattcatcgccttttttcagtttgcggaaatccatttgccactgcatggctttaatcactgcgctcacttcggcgctggttaaaccggcgtttctggcgctggcaacaaagctcccccgacggtacctttcagcagattgttaacccactctccttgctgcatttcgctggtcattttaaaaccgttagcggcagtacggtcataggttcgggtttcacgacgagacacttcccaggtgaggcgctgcagttcgccgtccgcggttaatgtccaggagagttgttgaccgattttcaggttacgcaattctttgtcggcagcagccagttgggtgatatcacccatatcaataccatactgattgagaatgctgcttagcgtatcgccagtggaaacaacatattcatgcacgcccgcttcaccggcgattttgtcatccagttcgtcctggggaatggcttcatcttcttgtgcagcttgatcaatcggctcactggcttcaggtaagagcgaacgaatttcgttctgttccagctcaatggttttgacaattggcgtggcatcgcggtgataaacatagggccgccagacagcgacggccagagtaagaacggtgagcgaccccaacataacgcggtgtggtcgcggtaaattattaaacgccagggcgacagagcgggctatctgttgcacgtaatcacttcctcattaatctcctttcaggcagctcgcatactggttggctaattgactcaggaattctgaatagcttgttttacccagtttgatattcgtccccaggggatccaacgttcccatacgaacggatgtccctcgtgcgacgctctcaacgaccgctggcctgaactgtggctcagcaaaaacgcaggttgctttttgctcaaccaactgtgttcttatttcatgtaaacgctgcgcgccaggttgaatctcagggttaacggtaaaatgaccaagcggtgtcagtccaaactgtttttcgaaatagccgtaagcatcgtgaaaaacgaaataacctttccccttgagcggcgcgagctcgttaccaacctgcgtttcggttgaggctaattgtgcctcaaaatccttcaggttggcgtcaagtttggctcgactttgcggcataagttccactaattttccatggattgcaaccgctgtagcccgcgctatctctggggaaagccaaagatgcatgttgaaatcgccgtgatggtgatcttcgtcactttttccgcgtggtcgtgatcatcatcatcgccgtgaatacttttcatcagtagcggtttcacatcttcaagctgcgcaatcgttacctgcttcgcttctggtaatttgcttaccggtttttgcataaacgcttccatctccgggccaacccaaacgactaagtccgcgttctgtaagcgttttacatccgatggacgcagtgaataatcatgttctgaagcgccgtcaggcagtaaaacctccgtttctgttacaccatcagcaatggcagaagcgatgaacccaacgggtttaagcgaagcgacaacggcggcatctgcggcctgtgttgcacctccccagagagcggcggataatgctgcgaaaagaagcgtttttttatgtaacataatgcgaccaatcatcgtaatgaatatgagaagtgtgatattataacatttcatgactactgcaagactaaaattaacatgacaagtctggtttccctggaaaatgtctcggtttcttttggccaacgccgcgtcctctctgatgtgtcgctggaacttaaacctggaaaaattttgactttacttgggccaaatggcgcaggtaagtcgacactggtacgggtagtgctcgggctggtaacacccgatgaaggggttatcaagcgcaacggaaaactgcgcatcggctatgtaccgcagaagctgtatctcgacaccacgttgccactgaccgtaaaccgttttttacgcttacgccctggtacacataaagaagatattttgcctgcactgaaacgtgtccaggccgggcacctgattaacgcaccgatgcaaaagctctctggtggcgaaacgcagcgtgtactattagcgcgagcattgttaaatcgcccgcaattattagtgctggatgaacccactcaaggcgtggatgtaaatggccaggtggcgttatatgaccttattgaccaactgcgtcgcgaactggattgtggcgttttaatggtctctcacgatctgcatctggtaatggcaaaaaccgatgaagtgctgtgtctgaatcaccacatttgttgttccggcacaccggaagttgtttccctacatccggagtttatttctatgtttggtcctcgtggtgctgaacaactgggtatctatcgccatcatcataatcatcgtcacgatttacagggacgaattgttttgcgtcggggaaatgatcgctcatgattgaattattatttcccggttggttagccgggatcatgctcgcctgtgccgcgggtccgctgggttcgtttgtagtctggcgtcgtatgtcttatttcggtgatacgctggctcatgcctcattacttggcgtcgcgtttggtttgttgctggacgtgaatccattctatgcggtaattgccgttacgctgctcctggcgggcggtctggtatggctggagaagcgtccacagctggcgattgacacgttattagggattatggcgcacagtgccctgtcgctgggcctggtggtcgttagtctgatgtctaacattcgtgttgatttgatggcttacctgttcggtgatttgctggcagtgacgccagaagatctcatcgctattgcgattggcgtggtcatcgtggtggctattttgttctggcaatggcgcaatttgctgtcgatgacgattagcccggatctggcgtttgttgatggtgtgaaattacagcgcgtgaaattgttgttgatgctggtgacggcattgacgattggtgtagcgatgaaatttgttggcgcgttgattattacttcactgctgattattcctgcagctactgcgcgtcgctttgcccgtacgccggaacagatggctggtgtcgctgttttggtggggatggtggcagtaactggcggtttaaccttttccgcgttttacgatacgccggcgggtccgtcggtggtgctatgtgcggcactgttatttattctcagtatgatgaaaaagcaggccagctaatctatcgctgaacacatttgtcggatgcggcgcgagcgccttatccgacctacggttcgctatctctggctggcctgataagacgcgaacagtgtcgcatcagacacactgccagtgtcggatgcggcgcgagcgaccaatccgacttacggcatttctggcggcgttatgccaaagtgattccacgcccgcgtcgtcgccatacgcccacgcggtgtacgctgcaaaaagccttgctgaatcaaataaggttccagcacatcctcaatggtttcacgttcttcgccaatggctgccgcaaggttatccagacctaccggcccaccaaagaacttatcgattaccgccagcaataacttgcggtccatataatcgaaaccttcagcatcgacattcaacatatccaacgcctgagcagcgatatctgccgagatggtgccatcgtgcttcacttcggcgaaatcacgcactcgacgcagcagacggttggcaatgcgcggcgtaccgcgagctcgacgagcaacttccagcgcgccgtcatcactcatctcaagccccataaagcgtgcgctgcgactgacgatatattgcagatccggcacctgataaaactccagacgctgcacaataccaaaacgatcgcgcaacggtgatgtcagcgaacctgcgcgcgtggttgcaccaatcagggtaaacggcggcaaatcaattttaatggagcgtgccgccggaccttcaccaatcatgatatccagttggtagtcttccattgccggatacaacacctcttccaccactggcgaaagacggtggatctcatcaataaacaacacgtcatgcggttcaaggttagtgagcatcgctgccagatcgcccgccttttccagcaccggaccagaagtcgtgcgtaaattaacgcccatttcattggcgacgatgttggcaagcgtagttttacccaaccccggaggaccgaaaatcaacagatgatcgagggcatcgccgcgcagtttcgctgctttgatgaaaatctccatctgtgaacgaacctgcggctgaccaacatactcttccagtaatttagggcgaatggcgcgatctgccacatcttccggcaaagtggtaccggcagaaatcagacggtctgcttcaatcatcctttacctcataacgcggcgcgtagggcttcgcgaattaatgtttcactgctggcgtcagggcgagcgattttgctcaccatgcggcttgcctcttgtggtttatagcccagcgccaccagcgcggcaactgcttcttgttcagcatcgtcggtcgccgggctggcaggtgatgtgagtaccaggtcggcggctggcgtaaagagatcgccatgcaaacctttaaatcggtctttcatttcaacaatcaagcgttcggcggtttttttgccaatacccggcagtttcaccagcgcccccacttcttcacgctcaacggcattaacgaactgctgcgctgacattccggagaggatcgccagcgccaacttcgggccgacgccgttggttttgatcaactctttgaacaatgtgcgctcttgtttattgttaaaaccgtacagcagttgcgcgtcttcacgcaccacaaagtgggtgaaaacgatcgcttcctgacccgcttcagggagttcataaaaacaggtcatcggcatatgcacttcatagcctacgccgcccacttcaattaacaccagcgggggttgtttttcaatgatgatgcctctgagtctgcctatcacatgacgctcctgcgtaatgaatcaaagataatgctgtatgataaaaaaatgctggatagatatccagcgaaggatgaagaaaacttgcgaggtgtcccgatgatctgaaaaatggcagagtataatttattcaacaggttatattggaagcaaatatttgaatattacatattcagtgaagaaatgcgtaataaaaatatacattgcgactcctgaaaaaataaattttttatgctattacgtatattcgtatcgatttcaatggaatgacaacgtgaatattaattaccctgctgaatatgaaattggagatatcgtctttacatgtataggtgctgccttatttggtcaaatatcagctgcatcaaattgctggagtaatcacgtcgggatcattatcggtcataacggtgaagacttcctggttgcagaaagccgggttcccctttcaaccatcaccacgctatctcgttttattaaacgttcgtctaatcaacgctatgctataaagcgattagacgctgggctgacagaacaacaaaaacaacgaattgttgaacaggttccttcccggctacgcaaactttaccacacgggttttaaatacgaatcttcccgccagttctgttcaaaatttgtctttgatatttataaagaggcgctatgtattccggtgggtgaaatagagacgtttggacaactgttaaatagcaatccgaatgcaaaactcactttctggaaattctggttcttaggttctattccgtgggagcgtaaaaccgtcacgccagccagtttgtggcatcatccgggtttggtgttgattcacgcggagggagttgaaacgcctcagcctgaactgaccgaggcggtataacttaacgcagtcgccctctcgccaggttcagccgcgattcgctcatctgcatcgcattctgactgacgtgacaatgggtaatcgcgatagctaacgcatcggcggcatccgcctgtggattagcgggcagtttcagcaaggtgcggaccatatgctgcacctggcttttttcggcactaccaatacctaccaccgtttgctttacctgacgtgccgcgtattcaaataccggcaattcctgattcaccgccgcaacaatcgccacgccgcgcgcctggcccagtttcagggctgagtcagcgttcttcgccataaagacttgttcaatggcgaaataatcaggctggaactgggtgatgatttccgtcacgcccgcatagatgagcttcagacgagacggtaaatcatccactttggtgcgtatgcatccgctacccaggtaggacagttgcctgcctacctggcgaattacgccatagccggtcacgcgcgaacccggatcaatgccgagaataatagccatcacgcgtctccgttttgctgtttagcaggcctcatcagagagtcgctgcgacctcatcagagatttcaccgttatggtaaacttcctgcacgtcgtcgcaatcttccagcatatcgatcagacgcatcagtttcggtgcggtttctgcatccatatcagctttggtggacgggatcatggaaacttccgcgctgtctgctttcagacctgccgcttccagagcgtcgcgcactttacccatttcttcccatgcagtgtagacatcaatcgcgccgtcatcataggtcacaacgtcttcagcacctgcttccagagctgcttccatgatggtgtcttcatcgcctttctcgaaggagatcacgccttttttgctgaacagataggctacggaaccatctgtaccgaggttaccgccacatttgctgaatgcatgacgcacttcagcaacggtacggttgcggttgtcagacagacattcaatcatgattgccgtgccgccaggaccgtaaccttcgtagatgatggtttccatgtttgcatcatcatcaccgcccacaccacgtgcaattgcgcggttcagtgtgtcgcgggtcatgttgttagacagtgctttatcaattgctgcacgcagacgcgggttagcgtccggatcgccaccgcccagcttagccgcggttaccagctcacgaatgattttagtgaagattttaccgcgctttgcatcctgcgcagctttacgatgtctggtgttggcccatttactatgacctgccataaaaatatctccagatagccctgcctgttcaggcagcgttaattacaaactgttcaatcgcctgccggttgctccaggacttagtgagcgccgccgcagcaggcgcatcaagccacttgtaagccagatgttcagtgaaaacgatctgccgctcgtgtgggagcgcaagacagaaccatgattccgtattacgcgtcacgcccggcgcatagcgatgacgtaaatgtgaaaaaatttcaaactctaccgtgcgctgacagtcaattaaggtcagttgttcagcgacaacatcaatggtgacctcttcctttacttcgcgcacggcagcttgcggcgcggtttcccctcttccacgctgccggttaccgactgccagaaatcgggatcgtcacgccgctgcaacatcagcacccgtttcgtatcttgtgcgtagatgaccactaagatcgaaacgggacgcttataagccatatcagttattctcagccttcttcacaacctgaatgctcagctcagccagtgcagtcgggttagcaaagctcggtgcttcagtcatcagacacgctgccgccgtggttttcgggaaggcaataacgtcacggatattgtcggtgccggtcagcagcatggtcagacggtcaagaccgaatgccagacctgcgtgcggcggagtaccgtatttcagagcgtcgagcaggaagccgaatttctcgcgctgttcctcttcgttgatacccagaataccaaacaccgtctgctgcatatcaccattatggatacgtactgaaccaccgcccacttcgtaaccattgatgaccatatcgtaagcgttcgccaccgcattttccggtgcagctttcagttctgcagcagtcatgtctttcggtgaggtgaacggatggtgcattgccgtcaggccgccttcaccgtcgtcttcaaacatcgggaagtcgataacccacagcggtgcccatttgctttcgtcggtcagaccaaggtctttacccactttcaggcgcagtgcgcccatcgcgtcggcaacaattttcttgttgtcggcaccgaagaaaatcatatcgccatcttgcgcggcagtacgatccaggatggcttcgatgatttctgcattaaggaacttcgctaccgggctgttgataccttccagacctttcgcgcgttcgttaactttgatgtaagccagacctttcgcgccgtagattttaacgaagttaccgtattcgtcgatctgcttacgggtcagcgatgcgccgcccggaacgcgcagagcggcaacgcgacctttcggatcgttcgccggacctgcaaatactgcaaactcaacagatttcagcagatcagcaacgtcggtcagttccatcgggttacgcagatccggtttatcagaaccataacggcgttctgcttccgcaaaggtcattaccgggaaatcgcccagatccacgcccttcacttccagccacaaatgacgcaccagcgcttccatcacttcacgcacttgcggcgcggtcatgaaagaagtttccacatcgatctgagtaaattcaggctgacgatcagcgcgcaggtcttcgtcacggaagcatttaacgatctgatagtaacggtcaaaaccggacatcatcagcagctgtttgaacaactgtggggattgcggcagtgcgtagaatttacctttgtgcacacgagaaggcaccaggtagtcacgcgcgccttccggcgtggctttggtcagcatcggagtttcgatgtcgaggaagccgtggtcatccataaaacggcgcaccaggctggtgattttagcgcgggttttcaggcgctgcgccatttccgggcgacgcaggtcgaggtagcggtatttcagacgcgcttcttcggtgttgacgtggttagagtcaagcggcagaacatctgcgcggttgatgatagtcagcgaggacgccagcacttcaatttcgccggtcgccatatcgcggttaatatttttttcgtcacgcgcacgtacggtgcccgtaacctgaatgcagaactcattacgcagttcagaggccagctttaacgcgtccgcacgatccggatcgaaaaatacctgcacgataccttcgcggtcgcgcatatcgatgaagatcaggctaccaagatcacgacgacggttgacccaaccacacagagtcacctgctgccccacgtgggacaaacggagctgtccacaatattctgtacgcatgagatatcccttaacttagctgccggcggatgccccctgctgcgcaggtgaccaagtcgcagcgttagctgtatgtcacaactgaatgaaaaaaggcggctattatactggaaattctgccgcaccgtaagagcctggcccgcgctggaacgcctcgttaccactttatatcgggcctgaaatcagactctacgccagtttgctataaaggtgttgcccgaactcataaaaattaacaaaatttgtcgttccgccatcggctaatcgcattaaggtgtgaggcacgattttgttttttcaggagtcagcatgcttgaacttaatgctaaaaccactgcgttggtggtgatcgatttacaagaaggcatcttaccttttgccggtggtccacatactgccgatgaggtagttaatcgcgccgggaagctggcggcgaaatttcgcgccagcggtcagcccgtgtttctggtgcgcgttggctggtctgccgatcacgccgaagcattaaaacagccggttgatgccccctcccccgctaaagtgttgcccgaaaactggtggcaacatccagctgcattaggtgcaactgacagtgatatcgaaatcatcaaacgtcagtggggtgcgttttacggtacggatctggagttgcaactgcgccgccgaggtatcgatacaatagtgttatgtgggatctcgaccaatatcggtgttgaatccaccgcccgcaatgcctgggaacttggctttaatctggtgattgccgaagacgcctgtagtgccgccagcgccgagcagcacaataacagcatcaaccatatctacccacgcatcgcccgtgtgcgtagcgtggaagagatccttcacgcgttatgatttacatcggtctaccgcaatggtcgcatcctaaatgggtgcggttgggaatcaccagccttgaagagtatgcccgtcatgttaactgcgtggagggcaacaccacgctttacgccctgccgaaacccgaggttgtcctgcgctggcgtgaacagaccacagatgacttccgcttctgttttaagtttccggcgaccatttcgcatcaggcagcattacgacattgcgatgatttagtgactgaatttttgacccgcatgtcaccgttggctccgcgcattgggcaatactggctgcaactgcctgccacattcggcccacgggagctgcctgcgctttggcattttctcgattctctccctggcgaatttaattatggtgtggaagtccgccatccacagtttttcgccaaaggggaagaggaacaaacgcttaatcgcggtttacatcagcgcggcgttaatcgggtgattttagacagccgcccggttcatgcagcacgtccacacagtgaagctattcgcgacgctcaacgaaaaaaacctaaagttccggtacatgctgtactgacggcgacaaatccgctgatccgttttatcggtagtgatgatatgacgcaaaaccgggaattatttcaggtctggttacaaaaattagcgcagtggcatcagaccactacgccttatctttttttacatacgccagacattgcccaggccccggaactggtacataccctgtgggaagacttacgtaaaacgcttccagagatcggagcagttccggctattccacagcaatcttctcttttctgaatttgccacctatcatagacaggtgccatcggccattttaaagggagtttgtatggtaagcgcgctgtatgccgttttaagtgcgttgttattaatgaagttctcttttgatgtcgttcgcttgcgtttgcagtaccgcgttgcctatggtgacggtggttttagcgaactgcaaagcgctattcgcattcatggtaacgcggtggaatatattcccatcgcgattgtgctgatgctgtttatggaaatgaatggcgcagaaacctggatggtgcatatttgcggcatcgttttgcttgctggtcgtctgatgcattattacggttttcatcaccgtctgttccgctggcgacgttccggcatgagcgccacctggtgtgcgctgttgctgatggtgctggcgaatctttggtatatgccctgggagttggttttctccctgcgttagcgcacaatacgccactttctttttcccggatttttacgttatgtctcaccgcgacacgctattttctgcccctatcgccagactgggcgactggacctttgatgaacgggtagctgaagtcttcccggatatgatccagcgttccgttcccggctattccaatattatttccatgattggtatgttagccgagcgcttcgttcaacctggtacgcaggtttacgatctgggttgttctctgggcgcggcgacgctctcggtgcgtcgcaacattcatcatgataattgcaaaattattgccatcgacaactccccggcgatgattgaacgctgccgtcgtcatattgacgcctataaagcccctacgccagtagacgtcattgaaggtgatattcgcgatatcgccattgaaaacgcatcgatggtggtgctgaattttaccctgcaattcctggaaccttccgagcgccaggcattactggataaaatttatcaaggactgaacccgggcggcgcgctggtgctttcggaaaattcagtttcgaagatgccaaagttggtgaactgttgttcaacatgcaccacgactttaaacgtgccaacggttacagcgaactggagatcagccagaagcgcagcatgctggaaaacgtgatgctgaccgattccgtggaaacccataaagcacgcctgcataaagccggttttgagcatagcgagctgtggttccagtgctttaactttggttcactggtggcattaaaagcagaggacgctgcatgatcgactttggtaacttttattctctgattgccaaaaatcatctttcacactggctcgaaacgctgcccgcgcagattgctaactggcagcgcgagcagcagcacgggctgtttaagcagtggtccaacgcggtggaatttctgcctgaaattaaaccgtatcgtctggatttattgcatagcgtaaccgccgaaagcgaagagccactgagcaccgggcaaattaaacgcattgaaacgcttatgcggaacctgatgccatggcgcaaagggccgttctcactgtatggcgtcaacatcgataccgaatggcgttccgactggaaatgggatcgtgttctgccccatctttctgatttaaccggacgcaccattctggatgtcggctgcggcagcggttatcacatgtggcgcatgattggcgcaggcgcgcacctcgcggtggggatcgaccctacgcaactgtttctgtgccagtttgaagcggtgcgtaaactactgggtaacgatcagcgcgcacatttgttaccgttaggtattgaacagcttccggcactgaaagcctttgataccgtcttttcgatgggcgtgctttaccatcgccgttcgccgctggagcatctctggcagttgaaagatcaactggtgaatgagggtgaactggtgctggaaacgctggttattgatggcgatgagaacacggtgctggtaccaggcgatcgttacgcgcaaatgcgtaatgtctatttcatcccttccgcgctggcgctgaaaaactggctgaagaagtgtggttttgtagatatccgcattgtggatgtgtgcgttaccactactgaagagcagcgacgcactgaatggatggttaccgaatctctgtccgatttcctcgacccacatgatccgagtaagacagttgaaggttatcctgcgcctaaacgcgcggtgctgattgcgcgcaagccgtaaaggtctggtattactgccggatgcggcttgaatgccttatccggcctacaaacccttgctaattcaatctattgcagggactatgtagatactgataagcatagcgcatcaggcagttttacgtttgcataacctcagcgcccgtttccgggcgctattcacttcttatgcctgaatagctggctgatcaaacgccgttaacttcggcgcattgcccgtatatttttcgatatacaccagcgcagagttaccggcacaggcatttgccagctgcgagctggggatatccgccgttaacacgttcgcactgccgtttttacacaagccattttccagatctggccatgcaccttcatgcacgcataccacgccttttttgatcccgtcagtcaccaccgcgcctgtcagaatctgaccacgtttgttccacacacgcaccagatcaccattcgcaataccaaagcgagcagcatcttcggtgtgaatagtgattggttcacgatctgcaaccgcatattttttacgcagttccgcatagttaagctgactatgtaaacggtgtgccggatgtgcggtcagaagctgcaactgcttctcgtcggcggtacccttccactcatcaggcgcaagccaggttgggtgtgccgggcaatccttatagccaaatttttccagcgttttggagtaaatctcaattttgccgcttggcgtacccagcgcatttttcaccggatcggcgcggaaatcagcataacgaacgtactgttcgttcttctcgctgcggcgcatttcgatcagtttattttgctgccagaaggcattaaacatcggcatagtcacgcgttgcgcacgagcacctttctgagcggcatcatagaaaaatttcagccacgccatttcatctttaccttcggtatagatctcttttccgccaggtttcagtaattcagcaagatcggcaaatacgtcaaaatcgttacgcgcttcaaattgcggagcaacagcctgcttcatcggcacaatatgctggttgctgtaatcaccggtcatcgtcaagtcattgcgctcaaacgatgtggtgatcggtaatacgatatctgcatgtttagcagctgcggtccagtagcattcagaaacgacgatcatctccggtttctgccatgctttaatcagacgattagtatcctggtgatgggtaaagttaccgccacccgcccaccagatcattttgatattcggatacgtttgctctttaccgttatgctgatatttgccgccaggattttccagcgcatcgacgatacgggcaacaggaatcgccgtcattccgccatcatcagcggcctcgctggcctgtccggcaatcgccgcagacatttccggcagcacgccgccaacacgtgtcgggttgccaccattggagtaatgataagagaaaccaaaaccgccgcccggtgtaccaatctgccctaacatcgccgccagcgtcaccagcatccagtgtttctgttcaccatattgctggcgctgaattccccagcctgccatcagcattgtgcgattcgccgccatcagttcagcgagtttgactatctgcgcttccggtacgccagtaatttccgccgcccaggccgcgctcttcggcgtattatcgctcttacctgtcagatactcttcaaactgcggatacccggtggtgtatttttcaaggaacactttatcatgtttgccttgtgtcatcagggtatgcgcaatccctaacatcagtgccacgtcggtgcccatattcggcgcgatccaggtggcattatcaccaaagaattcgatggtttcggtgcggataggatcaatggcaatcactggtttgccagattttttcagctgatggaagtattccagcccttgctcaacggtactgctccaggcaatttttaaggtattcagcgggttcattccccacagcaccacaacctggctgttttccagaatcagcggccaggaggtctgctgttcatacacctctacagaaccgaccacatgcggcatgatcacctgtgctgccccggttgaataatcgccgctatgcccggaataaccgcccgccaggttcatataacgttgcagtaaggtttgcgctttatgcaacacgccagaagagcgccagccgtaagatccggcaaaaatggccgatggtccgttagctttacgaatacgctcatgttgctcatgaatcagttttaatgcctgttcccagctcacctgtacataggtatcttcgcctcgacctttcgccggttgcagtggattatcgagatagctttttctcaccatcggatgctgaatacgcgccgtggtgtgtacctgatccgccgccgtagactgtaaggaattcggtatggttttcgccagcgcgcctgttgaagaaacaatcttgccgtccttcacttctacgttcatcgctccccaacgtcccgcggtgaggattttaccgcccttctcttctgcccatgcggggagcggtgctgccgatgtcaccaccagcgctccagcggcaataccgctgtgtttaataaattcacgtcttgttaatgtcataacttcctccctgatcaacgaggatcactgtttctcggtaatatctttggcgttgtactggaaataccgcgttaaaatgtccagttcgttttcgctcatgctggttcgtgcccccattcctttggcaatggacggccacgcattgacggtgtaatggtcggcggcaataggggcatgacaaccagcgcaataggtatcgtcaagtttttcagcgtattgccatagcggtttacggtccgctaatgcgggatcggtaagcgcaccctgtaaagacgcctgacgccattgattgccgtattcgtcagcctgccattccccgtttaccgtgagcgccttgataccttcttcacttaatgtggctagcgccagccgttgacctgccgccaggtagagcgtgttttcactgccctgcatttgataaccctgcaacagaacgatcggctgtttgccactggcatcaacgacggtgagatcggtaccaggattcacggtagccagctcgcctatgcgagaagttttgaaaggataaatatgtgcgccattagtcactgaagtagcggcctgactttccagctcatgcgccgcgttgtcatccatttttatttctggcggaaaatgggcaatgcctttatgacaatcgatacaggtttcgccgcccttttgtgctttgttatgcattttctgcgcagattcactttgcgaggcaatatccatggcatcaaaagaatggcaactacggcacgttgcagagtcagttgcttttaattctttccatactgtttcggccatttcctggcgatgagtttcgaacttatcgtcactgtctattttgccgctaacaaattcatgataaatatctttagatgcttttaatttagcaaataaataatccatccctgactttggaatatggcaatcggcacattccgcacgtatccctttctggttcgaaaagtggacagttccctgatattcctcaaaaggtttactcatcgagtggcaggaaaggcaaaatgctgtatccgacgttttatgtaaggctttttgcgccagcaataacccgccgccaccaaccacaaccgctatcagcaaaaacaataacccaatgcgttttttccctcgcatagattcctctaaataaattccagaacaccgaaatcattgtataattaaatacacaacgaattaaccacttgcataactcggcacaacactgcctgaaataatcgataaagaatatgatttattacaatgtaatcattaattgctaaggaataacccagttgctatttagaatatatatttatcagttttagcaatttaaatcccataatcaatgtgaatataaaaaatattattagcacaacgctatgttcactgtcacccgctcaacagatcacggttatcgttcgttttttatactgctcagggataaaaaaaggcccctgttgaaattgcaggggcctggtacgagcaagcatcatattgggcgacatgatgcaacggtaaaaatcatttggcctgatggcgttcaatgattcctttcatttcagcaaccgccgccccgtctacgatataacgcgaatactcgtccgcgtgtgcatctgatgacatggacaatccttgattacgataacgcatcggtgaggcttgccacgctcccgcggagctatggacttccagcactccggcatcgaggaagtggtgcaggttttctgcacggactcctgctccggccataatgattggagcatcacgatgggcaataagttccataatttttgataaaccttgcagtgcgtctgattttgccctgatgtcagtacccgggcaatgcccaattccgcaagattattgagtgtatataaagggttagcgcacatatcgaaggcgcgatgaaaagtcactgccagcggaccggcagcagccattattttttccattcgtggcatatcgacattcccgtcaacatcgagaacgcccgtcaccagtccaggaaaacctaattcgcggaccgtgcgcacatcttcaagaatggcggcaaactcaccgtcgctgtagcaaaaatcaccaccgcgtgggcgaattatcggatgcacagggatcgtcacccgctggcgcacggatttcagtacccccaacgacggcgttaagcccccctcttttggggctgcgcataattcaactctgtctgcgccgttttgctgcgccgttagtgcacattccatgctgtaacagcaaatttccagtaatgccatttttgctccttaattacgctgactgctcgctggcaacgatctcttcaatggaccacggatgaaacttaatagttgttttgccatcggtgaccgccagcgtcggattcggtaatcgctcatgctcaccttttggtgaactggttttaactgagatccccggtaggctgagtccttcatcagaaagcaaagccagcgcacgggcattcagcgtttctggatcacccggcagaacgatttcaatatgttcccaaccttcgtgtgggtaacgtttttccccgggccacggtagctccacaatagaaaactgccagtgcgcaacctgtaccggttcatgcaatttaaacagacaaatcggtctgccattgatcatattttctgacaaaagctcgccacactgttcaaacccgcgacgccagcgctcagcggtgacgttttgatggcaacgcaaagaaatgtgatcggcagtcagcggagtgatattcaaccccagacggcgggaaagttcatctaatgcgtgggtaaatcgcggtaaatccgatgcaatatcctgcagctcatcgatagattgccagttcgccataatcactcttcgtctttcagtaaaagcgttaatttaccctgttgccctgtgtcaaccaaccgctgatttcacgccgcttctgatgcaatagtgaaaacggcaatacgccacgcgcacgttgctgacgaaaacagccatttgcagtatactcccgccctaatttctttaactggtgcgggcaatttttgctcgcttcatcaatgtaaggtattccggtgaatattcaggctcttctctcagaaaaagtccgtcaggccatgattgcggcaggcgcgcctgcggattgcgaaccgcaggttcgtcagtcagcaaaagttcagttcggcgactatcaggctaacggcatgatggcagttgctaaaaaactgggtatggcaccgcgacaattagcagagcaggtgctgactcatctggatcttaacggtatcgccagcaaagttgagatcgccggtccaggctttatcaacattttccttgatccggcattcctggctgaacatgttcagcaggcgctggcgtccgatcgtctcggtgttgctacgccagaaaaacagaccattgtggttgactactctgcgccaaacgtggcgaaagagatgcacgtcggtcacctgcgctctaccattattggtgacgcagcagtgcgtactctggagttcctcggtcacaaagtgattcgcgcaaaccacgtcggcgactggggcactcagttcggtatgctgattgcatggctggaaaagcagcagcaggaaaacgccggtgaaatggagctggctgaccttgaaggtttctaccgcgatgcgaaaaagcattacgacgaagatgaagagtttgccgagcgtgcacgtaactacgtggtaaaactgcaaagcggtgacgaatatttccgcgagatgtggcgcaaactggtcgacatcaccatgacgcagaaccagatcacctacgatcgtctcaacgtgacgctgacccgtgatgacgtgatgggcgaaagcctctacaacccgatgctgccaggaattgtggcggatctcaaagccaaaggtctggcagtagaaagtgaaggcgcgaccgtcgtattccttgatgagttcaaaaacaaggaaggcgaaccgatgggcgtgatcattcagaagaaagatggcggctatctctacaccaccactgatattgcctgtgcgaaatatcgttatgaaacactgcatgccgatcgcgtgctgtattacatcgactcccgtcagcatcaacacctgatgcaggcatgggcgatcgtccgtaaagcaggctatgtaccggaatccgtaccgctggaacaccacatgttcggcatgatgctgggtaaagacggcaaaccgttcaaaacccgcgcgggtggtacagtgaaactggccgatctgctggatgaagccctggaacgtgcacgccgtctggtggcagaaaagaacccggatatgccagctgacgagctggaaaaactggctaactcggttggtattggtgcggtgaaatatgcggatctctccaaaaaccgcaccacggactacatcttcgactgggacaacatgctggcgtttgagggtaataccgcgccatacatgcagtatgcttacacgcgtgtattgtccgtgttccgtaaggcagaaattaacgaagagcaactggctgcagctccggtaatcatccgtgaagatcgtgaagcgcaactggcagctcgcctgctgcagtttgaagaaaccctcaccgtggttgcccgtgaaggcacgccgcatgtgatgtgtgcttacctgtacgatctggctggtctgttctctggcttctacgagcactgcccgatcctcagcgcagaaaacgaagaagtgcgtaacagccgtctgaaactggcacaactgacagcgaagacgctaaagctgggtctggatacgctgggtattgagacagtagagcgtatgtaatcgatttttcgtgagagtaaagcctgatcagggttacctgatcaggcttttttattgccatctaaatgtattctgaaaatggacatgccattgttttctcactgttggataagaggccagaagcgtaatatccggccccagggaaacgataacggttgaatttaaggaataccgcagtgtttaaatttcttgtattaacattaggcattatctcttgccaggcttacgcagaagatacggttatagtaaacgaccatgacatttcagccatcaaagattgttggcaaaaaaattcagatgatgatactgacgttaacgtgatcaaatcatgcctgcgacaagaatacaatctcgtcgatgcgcaattaaataaagcctatggtgaagcttatcgttatatagaacaagtgccacgcacaggtgtaaaaaaacctgataccgaacaacttaacttgcttaaaaaatcacagcgagcctggctggattttagggacaaagaatgtgaattaatcctttcaaatgaggacgttcaggatttaagtgacccttattctgaatcagaatggctctcatgtatgatcatacagaccaatacgcgaactcgccagttgcagctataccgtaactctgaagatttttatccaagccctttgacaagaggataattcacatctttttggcatgttttgttgcaagctattcctgataaataattgcaacaagacatcgagcctttttcactgagttattaaacatactcgcgagcgcgtaatttttttgtccttcagcgataattcacaatcacttcattacgttgtacctttagcggtggaattaaccgcccaccgcctggcacttcccagataaatcgcaacggttctgctgccgctataccggaaaaggccacggtggttccgctctgcccctctaattcgacacaacgagattgcgaacacaagcgaacccgcagtcctgaaggtgtcgggccgataagctgataacgccacgctaccagcgtcatcaatcctgaagcaggttgtcgcgtagaaagaggcgcagatgacatcgactcaccgcgatgatttagcgtaattcctacactacttgcctgccacatcccctccccggcggcttgcaccagcagcggaaacaataatattgctaataaggttctcattatttgccgccaattgtcgccgtcatgcggatatgtcggttatcagacagttccagattcgacaggaccactaactgcggcaagctgcggcgcaggaagcgagacaataatggtcgcagcgcgtggttcaccaacaatactggcggcgcacccagcatctcctgacgggatagcgcttcctgagtttgcgccagtaaacgatccgccagccctggctccagtcctcccccgccctgcagcgcctgtagtaacaaacgttccagcggtgtatcgaggccaataacatggacttcatctttgccaggaaaccactgctgggtaatcgcccgtcccaacgccacgcgcacgacggcggttaattcatgtggatcgctttggatgggcgcatgttccgccagcgtttcgagaatggtgcgcatatcgcgaatcggtactttttcatcgaggagattttgcagcactttatgcagtgtggtgagcgtgacgacgccaggaacgagatcttccgtcagctttggcatctcctgggcgacgcgatccaacagctgttgcgcctcctgacgaccaaacagctctgcggcatgctggctaatgaggtggttaagatgcgttgctaccaccgtgctggcctcaaccactgtgtacccctgaatctgcgcctgttcttttagcgcactttcaatccagatagcattcaggccaaatgccggatcgacggtcgcctcaccaggtaacgtcccggcagcggttccagggttaatcgccagccagcgccccggataagcatcaccactgccaatctccacgcctttcatcaaaatgcgatagcgggcaggttgcagatccatattgtcgcgaatgtgcaccactggcggcagaaatcccatctcctgggcaaatttcttgcggatactgcgtatacggcccaacaactcaccatcctgctggaaatcgaccatcgggatcagtcgataacccacttccattcccagagaatcttccagttgtacatcgttccacgtcgcttcgacaacggtattattctctgccatttttaccggtttgggttcggcaggcgctttttgttcgcgtccgcgtatccaccaggccagcccgagcaatccggcagtgaacagcaaaaataccaggttcggcattccaggcaccaggccgagtaaaccgagcacggcggcgcttaacaacataacgcttgggttactgaaaagctgattcaccatctgctcgccaacatcctgatcggtgctgacacgcgtaacgatgacccccgcggcggtagaaatcaccagcgccggaatttgtgccaccagaccgtcgccaatggtcaatagcgtataactttccgccgcgtgtcccatgctcatgccatgttgcagcacgccgaccagcaacccgccgacaacgttaatgaccatgatgaggatcccggcgatggcatcgccgcgaacaaacttacttgccccgtccattgagccgtaaaaatcggcttcctgagtcacttcggagcggcgttttttcgcctcatcttcaccaatcaatccggcgttaaggtcggcgtcaatcgccatctgcttacccggcataccatcgagaacaaagcgcgcacccacttctgcgatacgcccggcacctttggtaatgaccataaagttgatgatcacaagaatgacaaacaccacgataccgatagcgaaattgccaccaacgaggaagtgaccgaacgcttcgaccaccttccctgccgccgccgcgccggtatgcccttccattaaaatgatacgggttgaagccacgttaagtgccagacgcaacagcgtggtaaacaacagaatggtcggaaacgcagcaaactcaagcgtgcgctgggtaaacatcgccaccagcaacaccatgatcgacaaggcaatattgaaggtaaacaacaggtcgagtatgaatgcgggcagtggcagcaccatcatcgacaagatcaacaggatcaaaatcggtccggcaaggatctgccattgtgtcgatttcaggtttgcgggcaggcgcagcatcgcggccagattactcatgggtcggtttctcgttaataaaatccagggcttccggcaccggaagatgagtaggttgtacagggcgctgtccaccagccagacgccagcgtttcagttgccagacccaggccagcacttccgccaccgcggcgtacagttgacccgggatttgttgaccaatctccgcatgtcgatacagcgctcgcgccagcggcggcgcttcaagcgtcgggacgttattttcagcgccaatttcacgaatgcgcagcgcgaccagccctgcacctttagcgaccactttcggtgcgctcattttgttttcgtcatactgcaacgctaccgaatagtgggtcgggttattgacaatgacatccgctttcggcacatcggccatcatccgacgccgtgcggcagctcgctgcatctgacggatccgtcctttaacatgggggtcgccttcgctttgtttgaactcatcacgaatatcctgccgcgacattcgcagctttttcaggtggctgaagatttggaaaaagacgtcaaatcccaccattggaatgacaccaagcaccaccagcagtgcgcatagccctaccaaatccatcgcattacccatggcggtaatcggagactcggccattaagcgcatcatctgcggccagtgatgccagagaaaaaaccccgtcacgctgccaaccaggatggttttcaaaattgctttaagcaactccgcgccagtctgagccgagaacatccgtttaatgcccggtagcgggttgagtttggaaaacttcggctgcaaggatttgccgctaaataccagccctcccagcatgaccggagaaatgagcgccaccagtaccacgccgctaatcagtggcagcagcgccagcatggcttctctgatcagcagaataatctgcccgaggatcagattcgggtctttgataatactgtgatcaaaatgcagcccagcggagagcatgcccgacaatcgacgggccagcgacacaccgccaaaccagataacactaacgcccaccagcaaaatcagcagtgaggtcagttcacgggaacgcgggatttgcccctcttcccgcgctttttctagtcggtgaggtgtgggggcttctgttttgtcgtcgctctcgtcagacacgtcgccaatcctggaaagagtattaagcgtgaatgatgccagagcgcaaagcgttcaatggtttgagtaaggggcaaaacaggcgggatttagggcttttgctgccacacatcaagcatagtgtgcgtttgtcggatgcggcgtcatcgccttatcagaccgcctgatatgacgtggtcacgccacatcaggcaatacaaatcaaaatccaagactatccaacaaatcgtccacctgatcctgactggctaccacaccggctttgctggtatcgacctgaggtccattaagcaaactctggttttcacgttttggacgcgactcctgttccgggatgttttccaacagcaccatcagcaactggcgttcgatctcctgaatgacatccatcatccgcttaatgacctgcccggtgagatcctgaaaatcctgcgccatcatgatttccagcagttgcgcgttagtaaagctggtatgcgcgggtacatctgccagaaattgtcgtgtatctgttaccagttcacgggcgtcggcaaggtcaatcggatcggcaaaccagtcatcccaacgttgggttaacgcttttgctgatttctccatttgatcctgatgcggttgtgacgcctcaacactgttcagcgcccgctccgcagcctgggcggtcatctgcacaacatagtacaaacgatcgcgcgcatcggggatggcttccgccgcttcggcaatggcctgatccagccccagttcccgcaaactgtcgcgcagcatacgcgtcaggctgccgatgcgcgcaatgatatcgccagctgaatgctcgtcagcaggtttgattgatggttgcatcatagtcgcatcctcacatgcccagtttctcaaagattttgttgagtttttcctccagcgtcgcggcggtaaatggcttcaccacatagccactggcccccgcttgcgccgcagcaatgatgttctctttcttcgcttctgcagtcaccattaacactggcaatgccgacatcgcgccatccgcacgaattgttttcagcaattccaggccatccatattgggcatgttccagtcggagataacaaatccataaccgcctgcctgcaacttattgagagcgtcgacgccatcttccgcttcctcaacattattgaatcccagctctttcagcaggttacgcactatgcgtcgcatggtggaaaagtcatccacaaccaaaaatttaagttctttatccgccatttcacactcctgatttaaatacgtatcgcctgtccggcactaatttttgccaacatttgctggcttacctggctaagatcgaccacttcgcagacaccacccatattgatggcctcgcgcggcatgccgaacaccacgcaacttgcttcgttttgcgcaagggtccatgcccccgcctgacgcatcgccaacattcccgccgcgccgtcgttgcccataccggtcaggatcaccccaaccgcattacgccccgcctgtttggcgacagaatggaacaacacatctaccgaaggccgatgacggttaaccgccgggccatcgtgaattttgatttggtaatttgcgccactacgcgacagctccatatgccgatcgcccggcgcaatataggcatgccccggcaagacacgttctccgtcttcggcttctttaaccccgatctggcaaagcttattaagtctgtcggcaaaagagcgggtgaaaccgggcggcatatgctgggtaattaacaatgccgggctggaaagcggcaacggttgcagtacgtgacgaattgcctcagttccacccgttgaagcaccaatcgcaatcagtttttcagaactcaacaacggacccgccttcagcgttgtcggtgctgacaatggcttatgtgctgcaaggctcgcctttgctgctgtacgcaccttttcagcaatcatttcgctatacgccagcattccttcgcgaatacccagttgcggtttggtgacaaaatctatcgcccccagctccagcgcgcgcagcgtgacttctgaccctttgccagtcagggaagaaaccatcactacgggcattggacgcaaacgcattaatttttcgaggaaatccagtccgtccatccgcggcatttcaacatccagcgtcagcacatcgggattgaatttcttaatcaagtcacgcgcgaccagcggatcaggcgcggtcgccaccatttccatgtcgctatggctgttgatgatttctgtcatgatctggcgcatcagtgccgaatcatcgacagataacaccctgattttgctcatctttaatccttacttagcgcatacaccgtctgaccacgcagcgtgaagcggcgctcaaggtggctaaagttttcagagtgacccgcaaacagcaatccgtcgggtttaaggagcggaacaaagcggcgcaaaatctcctgctgggtattttgatcgaagtagatcatgacgttacgacagaagatcgcatcaaacggccccggcacggtgtactgtttcgccagtagattcagcggggcaaaatcaacatagttcgccagctcctgacgcacgcgtaccagcccttcatgcggtcccgtccctcgcatgaaataccgttgcagttgctgcggcgtcaggtttttcaactcttcatggcgataaataccgcttctggctttttccagcacttcggtgtcgatatcactggcaaacactttccagcgtccgggcgcggtgcccaatgtgtcagccagcgtcatcgcaatgctgtacggctcttcgccggtcgaagccgccgcgctccatacgcgatactcgccagaacggcgacgtgcgtgatccgcgagcagagggaaatggtgtgcctcacggaaaaatgccgtcagattcgtggtcagcgaattgataaacgcctgccactcaccgctgtgctgattagattccagcaagttcagataatgaccgaaatccgtcagtcccagcgaacgcaaacgacgaaccagtcggttgtaaaccatgtcgcgtttatggtcagccagaacgatcccggctcgttgatagatcaattgacttatccgccgaaaatgcgcgtcggaaagcgccaggcgctcggtcatctgtaacaataaagacgtttgcccacagggcagagatgaagtcatagcgccttctcaatcacttcaggataccactggcgcaatttgtaactgcaccgactcatgtcgtgctacttcatgttcttcaagggtaaataccgccacacgcgacgaaagatggtcggcctgattcgccagttgttccgttgccaccgccgcttcttctaccagcgaggcgttctgctgagtcacctgatccatctggctgacagcctgtgcaacctgctcaatcccccgctgttgttcttccgacgcagaggcaatttctcccataatgtcgttcacgcgggtcaccgaactgacaatatcgatcatggtcgcggcggcgttattcaccagtttcgaaccctgctggacacgattgactgactcttcgatcagccctttgatctcttttgctgcctgcgcgctacggctggcaagattgcgcacttcacctgccactaccgcaaaaccacgcccctgctctccggcgcgagccgcttccactgccgcattcagggccagaatattggtctggaaagcaattccgtcgataacgctgataatgtcgccaattttttgcgagctggtggcgatctcctgcatggtgtgagtcatggtactgacctgaacaccgcccgcctgcgccgttgtcgcggcattttttgccagttccgacgcctgtcgtgcgttatcggcgttttgccctaccgtggcggttaattgctccatactggcggccgtttgtgccagcgatgccgcctgctgttcggtacgacttgagagatcgttattgcctgcgacaatctccgcgataccaatgtgcatctcctggcttcccttacgcacatcacttaccgtcccacgcaaagcctgctgcatggtcttcagactggcaaaaatggcggtgatctcattacgaccatataccgcaatcggacgcgccagattacccgcagcaatgctgtcaaaatggctaccgataatggccagtggttgaacaatcatcttgcgcgtccaccacagcgcactgctgatgtagatcgccgcaacaataatcatgctgataaacaccagtgccgaaatctgatagttacgctggctttgcgcactggcggcttccagcacatggttgatctccagctgccaggcctcaaagttaacgtcaaacgcattctgtgatccctgcaccggcgcagtgaggaaatccgaaagttgattactttcaagccaggtcgcctgatgttcgagatcgttgtgccagcgggcaaaacttttctccgtctctttttgcaatgccctgacgtgctcgttgcccgcagtcatcgccataaaacttttaaacagcgtggtggattgcgtcagactggcgcgcgccgtcgtcatcaacgttttaatgtcatccgccggatagctaagtgccgtcagagtgcccgctttgttcagcgcggtactggcctgtaacattaccgcccgagtttgcgctaatgccgcacgttgctgattgctctgctcgacctgattcagtcgttgcaaatcgtcgcgaaatgcccaaaaagacatgccgttactgccaatctgcaagatcccgcagagaatcaaaattaaaaacagcgtggtcgaaattcgaatacgattaaacatcaacgctccccatcaggcggcaatgaccgcgttagtaaatactcgtcaaaatgtttcccagtttggatcttgttcagcaattcgcagtcgtggctgagccggtggttgctcactggcaggacgggatggtgtttgcggtttattggtgagtgggctggctgccagacggaacgcggaaaccgcttgcgttaaacgactcgcctgttcttccagcgcagcggcggcggcagctgattcctgcaccagcgatgcgttctgttgcgtgacgcgatccatttccgaaaccgccaatgcgacttgatcgatgccacggctctgttcatccgatgccgatgcaatctcgcccataatgtcagtcacgcgagtgacagcattgacgatattgttcattgtttccccggcgctttcgaccagcaccgaaccggtatcaacgcgtgcgacggagtcttcaatgagggctttgatctcttttgccgcctgggcgctgcgactggcaagattacggcacttcacccgccaccacggcaaaaccacggccctgttcacccgcacgcgcggcttcaaccgcggcattcagcgcgaggatattagtctggaaggcaataccgtcgataacgctgataatgtcggcaattttcttcgaactatcggcgatctcatgcatcgttttcactacgccatccaccactttgccgccgtgctgggcggtgtcggaggcacttcgcgccagttgcgaggcctggcgggcgttatcggcgttttgcttcactgtcgcggtgagctgctccatgctggcggcagtttcttccagcgcggatgcctgctgttcagtacgggaggaaagatcggtgttgcccgccgcaatttcacgggtaccggcatagatggcatctgaaccttcgcggacatgagtgacggtgtcagtcaaagagcgttgcatatgtgaaacgctctgcgccaggtcgcccatttcactgcgcccgtcaatggtcagggtattcgccaggttaccaccggcgatttcgcgaatgtgagcaataatttttgccagcggagtaagcaacatacggcgaatgccgtaccacgccaccagcagaatcaataccaccaccagcgcgataaccgccagttgccactgggcaaatcggtaatcatctgcgttgtcagtgacgatatcgcgatacagtttttcactgctgagggcgtactgagcaaacgcttcgcccattgcattttgcattccctgggttggctgagcgaaataagctccagtattgccataatctagataatcaatcagttcagttaacgctgtgtaatagtttttatatttttcatcaatattacgactggtagcgaccatttcaggtaacggtgccatgcttttgaattttttataatgcgtcgctgcctgcgccaatgttttcctggcgctatcgagcaattcaactttggcgttactttgttgattggaggaatccatcatcatccgtaccgctgaacgactcaggttaatgcgcgtttgcagcattaaatcccaggttgacgtcagctcgccctgctgttcccgtaattgattggaaaccacaaagctcttctggctatggtgaagggaagaaaaaaacagactgccggaaataagctgtaacagtgcgaatacccccagcaccattaccaacagcgtgactacgcggatacggttaatcataaggcaccttcctgaaaacaagttgatctcgttatcggcaaggaggggggaaactttattgctgatgccacccgccgcgaaattgaaataaaaaacccgatgcgcagatcatcgggttcatttcaattgaggaaatcgggagaattacgccacttctgacgccgcgctatctaacagcgccatctcttcgctgttcagcagtttttcgatgttcaccagaatcaacatccggtcgcccagtgcgcccagtccagtgagatattctgttgaaagcgtcacggcaaattccggtgccggacgaatttgctccgccgtcaatgaaagcacgtctgagacgccgtcaaccacgatgccgaccacccgctgtccgagattcaggacgataactaccgtgttgtcgttatagtccacatccacctggctgaacttaattcgtaagtcaacaatcggcacaataacgccgcgcagattcgtgacgcctttgataaacgctggcgtgttcgcaatccgtgttacctgatcgtagccacggatctcctgcactttcaggatatcaataccgtactcttcatcaccaagggtaaataccagaaattcctggcctgacggctcgctggccagctttgttacattcgtcataccggtcatattgttacctttttactcattcaggcggcggtgttcgccatacgttgttcgcggtttatcgcctgcaaggcggagacatcaacaatcagtgccacgctgccgtcgccaagaatggtcgcagcagaaatgccggggactttgcgatagttactttcaaggtttttaaccacaacctggtgttgaccaattaattgatccaccagcaaggcgtagcggcgaccgccactttgtaagatcaccacaattccctgggtggcttcggttttcgcgcccgcgacgttgaacactttccacagttcgacgatgggcagatattcaccccgcacttccagcacccgctcgccgccggccagtggatggagatcggcttcacggggttgcagtgattccataacagcattcagcggcagaatgaaaacttcatccgcaacgcgtacggacatgccgtcgaggatggccagcgtcagcggcagtaaaatgcggatcgtagtgccagtaccctgcttcgactggatttcgacatgaccgcccatctcctggatattacgtttaacgacgtccatgccgacgccgcgcccggagacgtcggtgacctgctctgccgtggagaagccaggtgcaaatatcagcatcgcgacttcgtcgtcgctcatgttttcgctgacagtcaaaccttgcgaggccgcttttgccagaattcgctcacggtttagccccgccccatcgtcggtcacttcaatgcaaatgttaccgccctgatgttcggcagacagaattaaatttccgacgctgtttttacctgcggcgagccgtttttctggcagttcaataccgtgatcgaggctattgcgtaccaggtgggtcagcgggtcgataatgcgttctatcaggcttttgtcgagttcagtagaactgcccaccagcgtcagttctacctgcttgccgagttttcccgccagatcacgcaccagccggggatagcgactaaaaacatattccatcggcatcatgcgaatcgacatcactgattcctgcaaatcacgggcgttacgttgtaactgccccatgctggttatcaaatcaccatgattaaccgggtccagttcgctggaacgctgggcaagcatggactgggtgataaccagctcgccgacgaggttaattaattgatcaaccttttctaccgctacacggatgctggtggattcattgctgcgcgtcgttttttcccgctccacgcggccggttggcgcttgttcggctgccagtttaagcactggtggggtggatatttttggcgagacttctactgtttcaaaggtaatctgatcggcttcaatcacaaaacagagtaccgctgtgatgtcatcttcggcgatgtcgcccggtaatattgccgagagcgaatccgcccctttcaccacgtcagttaacgttgtcagatgtcccagttcttcttccagcaggtcgacttccccggccttcaggcgcgaaaggataattcgtcgcggcgactgactgcgactctgctcatcttgcggttcacttttggcaaccacacttaatcgggtcactgcggatggcgtttcgcctttcgcttctaatgccagttgacgcaaggcctggcagatataatcgaagctggcggcatccggctcttgcgactgtttataagcgtcgagctgttcttgcatgatgtccttcgtttccaaaaacagattgataatgtcggtgttgagttgcatctcacctcgtctggcttcatcgagcaggttttccatcagatgcgtggtttcctgcaaaacgctgaagccaaaagttcctgcccctcctttgatcgagtgggcagcccgaaagatggcattcaattgttcggcatctggcgcttccggctgcaaaaccagcaaatgctgctccatgtcagccaacagttcgtccgcttcatcaaaaaatgtctgataaaaatcgcttatatccatgctcacgctgtcacctcggttcggctgatggcattgtgggaacactgacctgtggtgcaacctcaggtttttccagggcgcttactggctcattctggctttcggcgttttcatgcaaaatggcctgttcggcttgtttgttcagtaccagcaggctgatgcgacggttgacggcatcatcaggtccgcgatcgcttaagcgcatcgttgccgccatgccgacgacacgtaacactttgccgctatccaaccctccgaccatcagttcgcggcgggatgcattggcccgatcggcagaaagctcccagttgctatatcctttctcaccgctggcgtaggggaaatcatcggtatgacctgaaaggctaatacggttgggaataccgttcagtacaggcgcaatggcgcgcagaatgtcgcgcatatagggttcgacatcggcactgccggttctaaacatcgggcgattctggctatcgatgatctgaatacgtagaccttcctggaccagatcgattttgagatggggacgtaacgcccgcagtttcggatcggactctatcaactggtcgagatcaccccgcaatttccgcaatcgactttgctccatgcgttttttcagctcttcgatgttcggctgcttattcacttccccctggctttgggtgtaatcatcaccaccgccgggaattgggctttcactattagaaatgcgatcgccgcccgtaaccgcagtcgccagtggagtccggaagtactccgcaatctgaatcagctcttttgggctggagatggagatcagccacatcaccagaaaaaaggccatcatcgcagtcataaagtcggcataagcaatcttccacgatccatgtgctgccccgtggcttttggctttgcgtcgtttgacgacaataatcggatgcgcttgattcttcatgcttcctcggttgtcgtctgttgttgcggatttttcaccgcacgcacatgctcttccagttcaataaacgacggacgttcgctggaatagagcgttttgcgaccaaactcaacggcgataggcggtgcgtaaccgttcagattagaaagcagagtgactttgacgcactgcatcattttgctggtttcggcgcttttctgacgtaaaacagtcgctaatggggaaataaatccgtaagccaataaaatgccgaggaaagtccccaccatcgcatgtgcgataagcgcacccagctcggcggcaggacgatcggctgaacctaacgcgtgaacgacccccattacagccgcaacaataccaaacgccggaagtgagtccccgaccagcgccagactgttcgccgggacttctgcctcgctttcgtgcgtctcaatctcttcatccatcagggcttcgatttcgaaggtgttcatgtgaccgctgataatcaggcgcagataatcgacgataaaatcaagcatgacgctatccgcgaggatgcgtgggtagctggcgaagatctcgctctcacggggattttcaatatcacgttccagcgaaaacatccccatctgccgcgattttgccatcaaccgataaagcagagccagcagatccatatacattgctttggtgtatttggagcgacgaaacagcaacggcagcgccttcagcgtgcctttaatcgctttgccattattgccgacgataaacgacccaatccctgcaccggcaataatcaccagttcagcgggttgatagagtgctccaaggcttccaccggtcatcaaataaccgccgaaaactgtaccgagaacaaccaggtaacctaataagataagcacgacatcatccttccactgttgaccatgacaggatgttcagtcgtcaggcgttaacgcgcgattggggcaaaaaaagcagcggtacgtcgttaccgctgctggaatgttgcgcctcaccgtatcagttaaacagcctgtactctctgttcatccagcagttgtgggataatatcggcaggattctgggaaagtttacgtctttttactgccctggatggcggttgacataagctgcaggcaaagctgccaacaggctggtgagcgtgggtaataaaattgccgccgcagcagttgcagctggaaagttgcagtaatccactttcaacaaaccgcaccaatgtccaggcacgagttaatgccagcagtggtccttcttctgcttgtgggcactgttcaaggtataaacggtaggctttgatcaccgcatcgacgccattacacaaaccggttttcagtaaaaactgccatgcattacagaacatcgaagcatgaacgttttgttcccaggtcataaaccagtcggttgagaatggcagcatgcctttcggcggtgggcttccgcgcagttctttataaagttttatcaggcgtccgcgacttaactgtgtttcgctttccagcatctgcaaacgagcgcccagggtgatcaattccattgccagctgaatatcccgcgcttcctgaacaatgcttttttcactcatgatcaggcccttttcttgcgcagcgcttcttcaggctgattaacatcattcagcaagcgtgttgagagcatgatgccggtatgaatttgctggagatcgtcaacgcgggaatcttgcgtcaactgagtaatcgtctggtggctgtcaaaacggaagtgacaaaccagctgattggtttctgccagcttaaccatttgcggaagagtcagtgccgctaatgttgtcgccatttcttcatttatgccgagacgaaacatagcggacgctttgtcctgaacaatcagacgctgtgcaagtagtaaatatgacaagttgatgtcataaatgtgtttcagcaactcggaggtatgcattattcccacccagaataaccaactttatttttatgcggtttcaccgcaccctgtgatgtcgccgggaagccccggtaaaaataattagcattagaatagttgcgataagctgcaataagcagagccacctttttggtttaataagtccttacaaatagaagggggtctttacacttatctaagatttttcctaaatcgacgcaactgtactcgtcactacacgcacatacaacggaggggggctgcgattttcaataatgtgtgatacagatcacacaaaacactcaattacttaacataaatgtataagtcatacttttgtttttggtgtatttcaatctgttaaaaagtttttcgctacgctagcaagcaaaaatgaaacaggaataatcgaaatgggatgttgcgcacagttaaaataactcaccgtaaataatcatctgccataaataatcactttcatgcaataccagataagctatttttaaacagacacttaccgcacaacaaactaattaaatacaaagaaaggcaacaatcaacataatgttaatgaaatgttttacatatattaaccacttgtttaatgcggagaatcagtacactattttcttataattacatttgaaattatatgatcaccgggagtgattgattaattgtctttactaataatcagactaatatttacctgtttgaccgagttgggattgcgtcgtttctccattaggagtaaagctttaatgtcacctgaagttcacagaataaggaacaggttatgagctatagcaatattcttgtcgctgttgcggttacaccggaaagtcagcaactgctggcaaaagcggtatctatcgccaggccagtaaagggacacatcagtttaattactctcgcttccgacccggaaatgtacaatcaattagccgcgccgatgcttgaagatttacgcagcgtgatgcaagaagaaacgcaaagctttcttgataagttaattcaggatacggggtatcccgttgacaagacgtttattgcctacggtgagttaagcgaacatattctggaagtatgtcacaaacatcatttcgatttggtgatttgcggtaatcacaatcacagtttcttttcgcgagcatcctgctcggcgaaaagagtgattgcctcaagtgaggtcgatgtgctgttagttccacttacgggtgattaaccgctcctacgcaagctttggaaaggtagcaactttatcgcgctgctggctttccgcgcttcgcggaactatctgctttaggtcgctaatgaagcactcctgccagtggttaatatcgtttttcacgataacgtccagcatttctgcatgacgggaaatacgttccgccagcgacatagtcaatgcacgatccagcgcagctgcaacttcgtcacgatcgtaggggttaacaattaacgccgacgttaactcgtttgccgctcccgcaaattgcgaaagaacaagaacgcccgggttggctgggtcctgagcagcaacatactcttttgctaccaggttcatcccgtcacgcagtggcgtcactaagcccacgtcagagtagcggaatattttcatcagtaatttacggtcaaaatgctgattcaaataataaagcggcgtccagcctaattgcccgtatttaccattaattcgtccagcttcattttcgagctgatgacgaatatcctgataggcttgcacatcaccacgcgacgttggtgcaatctgggtataacgaattttaccatgatgctgcggatatttttccagcaacgcttcataggcgagaaaacgctctggcaaacctttggaataatccagccgttcgacagaaaagatattttgtacgtttttcagttccgctttaagttgcgccagttttggcggcagtggcccggcagcctgtttggctatttctttcggttcaatgccgatcgggtagacttctgttcgaaatgctttgccccaggctgtatggctttttgcgctacgtgtcgtgacgcgggtcaggttagaaagacaatccaggaacgccagacgatcgttttctgtctggaaacccagcaaatcataatcacaaagctgttcaagcaaggtgtcatatgtcggcagcgcgttgaagatttccggtgtcgggaaaggaatatgcagaaagaaaccaatgcgattattcactccccgtttgcgtaattcatgcgcaaatggcaacaggtgataatcgtggatccagataatgtcatcgtcttgcaacagcggcagtaatttatctgccagcaacgcatttacgcgtagatagccgtcccaggcaggacgctgaaattgcaccagatcgagccgataatgaaaagcgggccagagaacggcattggagaattggttgtagtattcgtcaaggtcctgttcgctgaggttaaaagaggcccacgtaatgttaccttttttcaccttttttagcggctgatcctcattccctgtttcgccactccagccaaaccacagtccgcctgcggctttcagtgcccccagtatgccaacggcaaggccaccggcactggcggcgtgctcgtctggtggtgcaatccggttagatactacgactaaacgactcatagtcatcactcctgttattttctcttttttgttgtaatgcggtggttatcatttcaagccagctccagacatccggcacacccgccagtcgccatgatgcctgagttgcacctgtgccaatttttactgacattccgcccagccggttaacggctgcgaagccagattcatcggttaaatcatcgcccagaaatacgggcgttcgcccgataaagggagcttcctgcataaaagctgcaatcgcctcacctttactggtacctctcggtttgatctcgacaacacactttccctgctgtaacgccatttgtggccagatctgagtaatacgttgcgctaatgtcattaatgcgtcttcatgctgcggagcctgacgataatgcagcgcaaaggccatccctttcgtctccagctccgcaccgggatactgggcgatgaccgtatgcagttgcacgctaatatcacgcgcaatcgcatccggcagatgaacgatatgtgttttaccattgatgtcacggcgctccgccccatgcacgcccgctaacgggaagcgataaggttttgccagtgcgtcaagctccaccattgagcgccctgatatcaatgccaatgcaccatcacttgcggttgccagtagctgtagtccttgcagaatgttgtcaggcacgacgacctgatcgggatgcggtttgatttccgccagcgttccatcgagatcaaaaaaccaggcatatttcgcggatagttcaggggtttcggttaacggttctgtcacccggttctcctccttctcttttcttattgtgttgcgcagaacgcgctttacagacatgtaagtatagacagtgtgacgggggtcgccatttgcaacgaagaacagccaaccgttatggcggttggctatggtgggaaaaaacgctaaattgttgcagaaaaaagcatcagacagtgcgtttcgctttttgcttgtaacggtcgaagatcaccgctgccagcaggattaagccgcgaaccacgtactgcgcgaaaggagaaatatttagcaggttcatggcgttttccacggtgcctaaaattaagatacccgccaccacatatgagatttttccgatgccacctttcagagaaacgccacctaaaacgcaggcggagataacaatcagctcataaccaatcgacgtcattggctgcccactggtcatacgtgaagccagaataattccggctatcgctgataccaggcctgagagaacaaagataataattttggtgcgaacaaccggtacacccgccagacgcgcggcctcttcgttcccgccaatcgccagggtgttacgaccaaaggtggttttattcagcagcaaaccaaagataatcagacacgcgacggtgagccagattggcgcaggcagaccgaaccagttggcgtaaccaagggcaaagaagctttcatcttcgataccgaccgctttaccgtctgaaatgatgtacgccagacctcgaacaatctgcatcgttgccaatgtcgtgatcagagcatttattttcagtttggcgataacaaagccattgaccaggccacagagaacgcccagcaacaaccccgctgccacgccaatccacaggctttcagtcaggttaataaccaccgccgtggtgacacccgcacaggcaattacggaggcgacagaaaggtcaaagtcaccggaagcgaggcagaacaacatgccacaagccaccatccccgacatggaaattgccaggcccaaccctttcatattaatgaaggtggcaaaatttgggacaaaaatggcacaggcgataaagagcaccgcaaacaccaccagcatgccgtactgatcccagatacgcccgaagctgaatgacgacttaggtgcgccagaccccgatgtagaaacagaagacatcatactctccttactcaggcaacagcctggctgactttaggcatcgcaaggctcagtgcctgacgctcatctgcctgctcgtgtaacaattcaccggcgatttcaccttcccgcatcaccacaatccggtcggcaacgccgaggacttcaggtaagtcgctggaggcaaacagcaccgccacgccctgcgccgccagcgcataaattacgttatatatttcgtgcttagcgccaacatcaatgccgcgcgtaggttcatccagcaaaatgaccttcatctcttccgataaccagcggcccagaatggctttttgctgatttccgcctgagagattcatgatcagttgctccgcgcccggcgttttgatgttgagcgaacgaatgtggtgatcggcattgttttcttcccaaccgttgttgattacacaaccgccgagcacatgtttacgtctggcactgatgttgatattgtcgcgaacggagtgcacgggaataatgccttccgctttgcgatcttccgggcagagcatcatgcctgcggcaatggcgtggctcggtttacgaatatcgatcggctgttggtcgatataaacctgaccggcggtgatttgcgtcccgccaaacatgcctttcattaattcgctacgccccgcccctaccagaccaaacagcccaacaatttcaccactgcgaaccgccagacttattggcgtacgcacgcctggtgctttcacagcatcaagacgtaggcgctcctcgccataactacgcggttgccagccgtagatatcgccaatgtcgcgcccgaccatcgcctgcaccagcgcgtcgtggtcaacctgctgcatatcggtaaaggttttgacataacgtccatctttaaagacagtaatggcatcgctgagggcaaatatttcttccatacggtgagaaacgtataagatcacccgcccctcttttcgcagttcacgaataacgcggaaaagattgtcgatttcacgggcagagagggagctggttggctcatcaaaggcgataattttggcgttacgcgccagcgctttggcgatttcaaccatctgccactgaccaatggagagatatttcagcggcgtgtccgggtcaatatccataccaagatgtttaagttgtaaacccgcctcataattcagcaatgagcgattcacaatgccgcctttatgcggcagctggccgagatagatgttttccgcgacggtcatttccggcacgagatgcagttcctggtaaataatcgccacgcccgcgttaagtgctgcggtcgtgtcggaaaaggacatttcctgcccattaatcactacagaacccgtggttggcgcatagttgccgctgaggatttttaagagagttgattttcctgcgccattttcacccatcaacgcatgaacctgaccggcatagcagtcaaaactaatatccgtcagcgccttaacgccgggaaacgttttaccgatgccgcgaaatgagagatacggggtagactgttgcataacgtctccgtgaatcactggtcgttcacaccccctctgcatcatgcagaggggaatttttccggcaaattacttaccgcctaaaccttttttctccagttcttctttaaagttgtcacgcgtgatcagtaccacgtcggtaacttcggtaaattttggcggttcaacgtcttttgctacccagttgtaaagcatttcgctggatttatagccatgaacatccgggcttggcagcagggaaccgtagaagccggttgcctgtgctttagacagttcgcttacggcatccacaccgttaataccaataccgatgatatcggctgctttaaagccctgaccttcggttgcacgtacgccgccaagtacggtgctgtcgttcataccgacgatcagccaatgtttaacttccggatgttgaaccagcattgagttggcagcgtcaaatgcccccgggatgtcgttagatttggtaggtacctgataaatttgtttttccgggaatccggccgctttcagtgcgtccatagaacccgttgtacggcggcgggcggtatccagttcgttggcggtaatcgccatcaccgcgctttctttgacatcccaaccccgtttctgcatctctttatacagttcctggccctgacgttcgccaattttagtcgccgccatcatcaccagcggaacggtatccattggcttacctttggcgttaacaaactggtcatccacggcaatgactttcatatcgtagccacgcgctttcgcgacgatggcagagccgagtttggggtccggagtacaaataacgaaaccttttgcgccactggctgccaggctgtcgatcgcgttcaatgttttttcgccatccggcacggcaatcttaataacctcaaaccctaaatccttcccggctttatcggcaaacttccattcggtctggaaccacggctcttccggttgcttcaccaggaaaccgagcttcaggttctccgccatagcggattgtgacataacggctgccagaccaatggctgccagggctttagtaaatttgtgcatggttctctccagctttagtgtcgttttgtgtagggcaaaaacgaatgacattcgttaaattaatcggaaaacaaagcattaccttttaactaaaagataagtgactgtgttgacatagttttagcgagaaattaattctccataggagagcaatatcacatcgcagaattacagtgagaacgtgcataaatttagcgggaaaagacataagggaaagccaatttgtcagacaaattgtcgaatgcacagcagattaatccataagattagcctggaaatccttgttgtctttggtacccatgcgggatgtcttctttttaaccagtcaataggccgcattacctggcgttgagtttttgaaatggtgtaataaccgcaactcaaagatgtggaaaatgcacgtcattcatttcgtcattaattatcactgtgctcattaattaacagaacacgtataatgagagccatctcgcaaaaatgaaaaaacgttttataaaatcatcacttcatcatgaattcaaattcattgattaatatcaacaagatacaaaaagcactatcattaaaattcattgcagttacattgatttcatcaatgaaatgtaaaaatatataaacttgatgatttaagcattttcttatacccgttcagacgttattcttatttcagatcatcgtcagaattgactccacgatcacatttcggaccggcagaaaggaattattctgcaaacagtaattatggtgttttgatttatcttgcacctctccacttctggatataaggatattaggtatggcaaccgctggaatgcttctcaaactcaactctcaaatgaaccgcgagttttacgcatccaatctctaccttcacctgagtaactggtgttctgaacagagtctgaacggcaccgccactttccttcgcgcccaggcacagagtaatgtgacccaaatgatgcgcatgtttaactttatgaagagtgtcggcgctacccccatcgttaaagccattgatgttcccggtgaaaaactgaactctctggaagaactgttccaaaaaacgatggaagaatacgagcaacgttctagtacgttggcacagttagccgatgaagcgaaagaactgaatgatgattcaaccgtcaatttcctgcgcgatctggaaaaagaacagcagcatgatggtctgttgctgcaaaccattcttgatgaagtgcgcagtgcgaaacttgcgggtatgtgccctgtgcagaccgaccaacatgttctgaatgtcgtgtcacaccagctgcattgatcatcatcggcgctaatgcattgcgccgatgaaggttttgagaaaccgctgcctcatctgtttgaagcagcggtttttttaatgggattcaccctgtggggtaaacttgagttcaataagcgcgatggctttttggattgcccgcatggtgaccgggtctgcggcggcgggatggttagtaaagtcgatattcttcagctgactggacattttttcacgaacttcaacgggcgcgattacatcgagaacatccagaatttgtttgataaccaactggcaagcaaccacatcagaaaccagttcctgatcggcattcagcggctgggacatcgtaaactcctgatagcattttgaaagccgttatagtagcggcttcacatcttcagcgatagtcacatccaccgtcatcaggacacaaaaaaacctgccggagcaggttttttgttatcggaacatattgcctggcggtacgtctttgaacgtcttgcaatagttattgaacatacttttcagtattttgcgcagtttcatcgcggcactccgaccatttgttatacaggtgttattgtctttgcacttataatatgacaaccatcacaaaaatcaatctttatgtgatgtgaatcacataaatacccctttaatgttataaaaatgataattaaaaagcagctaccccatttctgacacctacagatggcaagaaatagcgcctgccaggcgtcttttccggccattgtcgcagcgctgtaacgcgtaaaatagtgctttcttttactcttctggctggaccatgagacttctgattctgactctttcattaataacgctggcggggtgtacggttactcgccaggcccatgtgagcgaagttgacgcggcaacaggtattgtacggttggtttatgaccaggcttttttgcagcatgcccgtaccgatcgttatgtcagtcgcgggatcgccgatcgcgcatgccagcaggaaggctatacccacgctatcccctttggtcagccagtaggcaactgtagcctttttgcgggttccttatgtttaaatacggaattcactttgtcatatcagtgccatcattccgccttccctgtctttctctaaatgttttaatcagcgagggggatcttcgctgattaaataaatagcggtaatgcgttttattcccattcgtatttttaataaatgaagtttatattttaccttttgcaaataataaaataacaaattatagtgacgccacagcaacaaatataacctttgtggagcactatcatgctgaaaccagaaatgattgaaaaacttaatgagcagatgaacctggaactgtactcttcactgctttatcagcaaatgagcgcctggtgcagctatcataccttcgaaggtgctgccgcgttcctgcgccgccacgcccaggaagagatgacacatatgcagcgtctgtttgattacctgactgataccggaaacttaccacgtattaataccgttgaatctccgtttgctgaatattcttcacttgatgaattattccaggaaacctataaacacgaacaattaatcacgcagaaaattaacgaactggctcatgctgcaatgaccaatcaggactacccaacatttaatttcctgcaatggtatgtttctgagcagcatgaagaagagaaactgttcaaatcgattattgataaattaagcctggcaggcaaaagcggcgaaggtctgtattttatcgacaaagaactctctaccctcgacacacaaaactaatgctctcaggcggcaggttttctgccgccgtttcaaatcagtgacggcaaatcttactctgatcggtcgaaaaaccttcttctgaaggtataaatttgccttttgctgccagaaacgctaccagctctcccgcagtcatcccttctgccgagcaggtgtgaaaacgtgcctgttcaccaaaacgcgctttaattgctgcttccagactggcatgcgtatattgctcgcctgattcaatcatcatatttaacacttcatgaccgtgaatagagtccatcgttcctcctcaaaaaaagcctagcgtagcgattgccgcttatgaagactttgcgccagcgcagaactaaacgcttttattgtacatttatatttacactatatgtaacgtcggtttgacgaagcagccgttatgccttaacctgcgccgcagatatcactcataaagatcgtcaggacagaagaaagcgtgaaaaacagaactctgggaagtgtttttatcgtggcgggaaccacaattggcgcaggcatgctggcaatgccgctggctgcggccggtgttggttttagcgttacgttaatcttgttgattgggctttgggcgttgatgtgctacacggcgctattactgctggaggtgtaccagcatgttccggcagataccggtcttggcacgctggcaaaacgctatctgggacgctacggtcagtggctgacgggcttcagtatgatgttcttaatgtatgctctgactgcggcatacatcagcggtgccggtgaattgttggcctccagcatcagcgactggacaggtatttcaatgtcggcaaccgctggcgtgctgttgttcacttttgttgccggtggcgtggtttgtgtcgggacatcgctggtcgatttatttaaccgttttctgttcagcgccaaaattatttttctggtggtgatgctggtattgctactaccgcatattcacaaagtgaatcttttaaccctgccgttgcaacaggggctggctctgtcagcaatcccggtgatttttacctcatttggttttcacggtagcgtgccgagtattgtcagctatatggatggcaacgttcgtaagctacgctgggtgtttataaccggtagtgcgatccccctggtggcatatattttctggcaggtggcaacgcttggcagcattgattcaacaacctttatgggattgctggctaatcatgctggattaaacgggctgttacaggcgttacgcgaaatggtggcctctccgcatgttgagctggcagtgcatttatttgctgatttagccctcgccacgtcatttctcggcgttgcgttaggcttatttgattatctggctgatttatttcagcgttcaaataccgttggtggacggttgcaaactggtgcaattacctttctgccgccgttggcgtttgcactgttttatccacgaggatttgtgatggcgctgggttacgccggtgtggcgctggcggtactggcattgattatcccttcgctgttgacctggcaaagcagaaagcacaatcctcaggcgggttaccgggtgaaaggtggtcgtccggcgctggtggtggtgtttctctgtggtattgctgtgattggcgtgcaatttttgattgcggcagggttgttaccagaagtggggtgatcagatagcctcaaattccttattggtgccagaattaacgctgacacccaatttgacctcttaatgcaggcagcactgcttaaatttcttaccactaccgcacgggcaaggatcgttacgccccggtttctcttctgctttgatcggttgctgaacagctttttcctgcggatgcgccatccagtacgcatgtagatcaagcgccgccagtcgaatggcatctacgctctcttcaaacgcttctggcgacattttctctacccgctcgaagttttcctcagtaccgtgcagcgcaatcgcctccagcgctggttttaacgaatcgggcaacgttgagcagtcagaaagtgccacgccccgcatatagccaaagcaccactcctcaacaatcgtcagctcgctgccatcaacttctcgcaagccgaataacggctcaaactgctccgggaattcgttcagacgctctgcggtatcggccatatgttgaaaagccagattcataaagcgcgtcatctctttctctgacgcccagcgcggcacatagtcagccccaccccacacggcaaccagccactgtgccggttcaatctcttgcggagaactcaacaccgccgtcaataaaccgtccagctccgccacatcaaggatggcgtggtcagtgttgtatttggtcagaatatcgtccagccattccaactcactttcgtttaacggtcccgttttcatacgcttttccttgtggatctcaactcgccagcacctatcttacatgccggtccgtatcagagatactttttgagtggctttgccggtgattaaaaattaaggagggtgtaacgacaagttgcaggcacaaaaaaaccacccgaaggtggtttcacgacactgcttattgctttgattttattcttatctttcccatggtacccggagcgggacttgaacccgcacagcgcgaacgccgagggattttaaatcccttgtgtctaccgatt

SEQ ID NO: 182 - DNA, 13136 bp, Escherichia coli
aagacccggtagcccgtgcctttgccacactgaaggcgcttcccgtttatctgcgagaacctctgagccgccacctctctttcctgcgcaagaagcaggaagccgatcgtcagaaaggcaaaaagagctggcaggcggaacgctatgcacgcggaaccctgcgcaaaatattcgaacgtctggatcgcactgacgggcgctggctgacacctggttatcgctcccttgccggacgcgaacgcctggacgatttgctttacctgccgcagctcaacaaacaccagatacagacgctggccaccatgacggcggcgatgttcagcagcaccttcgaaaaactctgcgatggctttggcgcgaccgatggcgagctgaccatggatgtaacgctgaagacgtatcagatgctggcccgcatggcgttacacctgcacgccatgcctccacattatgacgcactgacaacagacaaagaccggaggaacgaaccagacacggagctgctgccgggcgcaatccttcgcctgacctgtgcggaatggtggaaacgcaaactgtggctgttacgttgcgagtggagagaagaacaactccgcgccgcctgtctggtttccagaaaaacatcaccctatctgagccaggacgcgttaagcgagtttcgcgcacagcgcgagaaaacacgcgatttcctgaaaagtttcatgctggaaaacgaagacgggttcacgattgatctcgagacagtgtattacgcgggagtaagtaacccggttcaccgtaaggcagaaatgatggccaccatgaagggactggaacttctggccgaagcccgtggcgacagagcggtgtttctgactgtcacctgcccgtcaaaataccacgcaacaacggagaacggtcatccgaaccctaaatggaacggggccaccatgcgcgactccagcgattacctggttaacacgttttttgcggcggtccgcaaaaactgaaccgcgacggtctgcgctggtatggcatccgcacggtggagctcaccatgacggcactgtgcactggcatatgatggtctttgctcatccggaagaaatcgacagcatcgtggccatcacccgcgatattgccattcaggaagaccgccacgagctgggcaatgatattactccgcgctttaaggtggagtatgtcgacggctcaaaaggcacaccaaccagctacatcgccacctacatcggaaagaacctggacagccgcgccgtggatggcatcgacccgaaaacgggcaagccacgcgttgaccacgaaaccggaaaatcaatggccgagagcgtggaacgcgccatcggctgggcgcgccttcaccgggtccgccagttccagttctttggtatcccctcccgtcaggtgtggcgtgaactgcgccgccttgccagccagatggcacgcaacccggaaggcccgcaacggctgaaggatgacgcaatggacgcggtactcgctgccgctgatgccggatgttttgccacctacattgagaaacagggtggcgtacttgttccacgcaaagactacctgattcgcaccgcctacgacctcgcagatgagctgaacgattacggtgaacagagcgtacagatttacgggatctggtcgccgctcattggggagtcttcccgcgtatgcacgcatccggataactggaagctggtaagacgcaaaccggaagcggaagacagcgcccgcgaaaatggttttgaccttcagggcggccctgccgccccttggactcgtggcaataactgtccccgtgtacaggaaacggacaacaacgggacagaacagccggaagaacggccagcaccgtggccgcagctccctgacggcgttgatgtggatgaatggatgcgctcactgaaacggcacgaacgccgggcgctgatgcgttcgcttcgtgacaaacaggcaaaaaacagcagtgatgaaatgcagagctggacacagagccgcaaacagcagcggcctttgcctgataaccacgaattactcgctaaagaatggcgggagtctgctgaatctctcggcctgcatatcggtgaacaacagatgcagcacctgttacggggcggcagtctgtacgttgacggcagcatcattgcaccgcagggatttgaaattgtacgcaaaccggatacccgcccggacagccgaatcacgcagctctggcagcgcctgagccgtaatcatggcgtaagcagcacggagatccgccataacccggtcgccagctatctgacacagctgggggcatcagaccctgaagccgccgcacgcctggcatccacacttcagcaggaccagaacaccatgaaaacacccgttaccgtgctttctgacatgctgcgcgccatccgcgacgcagagcacgcacagagaatcagtgaaaccactgaacgcgcccgccgcaaagcagacctgctgcggggtggcctgaccagtggaaacaaaaaacagacagaaacgggactcacgaatcccgtaaatgagcaaaaaacgcgcagcgatatatgaagcgcgcacaaaacaggcaaaaacgggatttcagaatcccgtaaacgattaattaatcaacataaggaaaagcgacatgaaaatttgtatcgacgacggctccaccaacatcaagctggcatggactgagaacggcgaacgccgcaacgccatcagcccgaacagcttcaagtcggaatggtctgcgccgttcggtggcacgcagcccgcgaactacatgcttgatggcgtgcgctatggttttgatccggtcagcgatcgctttgtccagacgaccgacacgcaataccaatacagcgatgtgaatgtcattgccattcatcacgcgctggtcaaatcaggcatcacaccacaggaggtggatgtggttgtcaccctgccactgagcgagtatttcgacacaaacgcacagccggacatgaccaatatcaaccgcaaaaaagcgaacgttatgcgcccggtggagtaccagaacggcgaagcattcactatccgtaacgtacgggttatgcctgaatccattccggctggctttaaggcactggctgacatgagtccgtttgaatccctgctgattgtggatttgggcggaaccacgctggatgtggcaaaggttcaggggcaactggcaggtatcagccaggtgttttgcgatccacacgtaggcgtttctctgatggccgatgccgtactgtcggtgatggccactaacggtatgcgcaccagtcaccacatcgccaataccattatcgaacatcgccatgatgaagcctggctgcgccagcacatccacaatgacgcgcattacgccagcctgatggcggttattcgtgaaaaggaagaaacactgaaacaacgcgtgatccgcgcgctggcgggtttttcgggttacgggcgggtgatggttgtcggtggtgggacggagattgtggcacccgctatccgcgaagcctgcggagttaatgcgactttcatcgcggacggggtgccacagtttgctctggttaatgggctgtacgcaatggacaaggagtaaaccaatgacgacaccaaccagacggataagtttctatctgaagccagtcgccgtcaatagtgaacgggaggcgtgtaattacctcgacagcctgccagcctctgaacgcagccgcgcgcaacgcgcggcctttctggccgggctggcactcataaaacgcgatcctgcatttgcctattggttggccgaatggccggaagaaggagctgcgccagccaagaataatattcagagtaaatatgccagcgcacctgccaccggaagcaatcacagcactagcgagataagaaagaacattcagtcatttttcccagagtgaaaacaggagaggagcatctatggcaactatccccaaaaaatggttacaacgcaaaattgcagaccttgaatcgtgtcgtgaagacatcccgtttggccttgatgaaaacgatcacaatatgttaatcgcactgaaaatcgcactcacatcgctggaagcgaaacctgttgcatggactgatgatgaggaactgcgtgatgtcaagcagtatggtttcggtgagatatttcagtgtccgccagataaatacgcggacccgcgacgtgttatccctatgtatcgagagccgccagcgccagcagtaccagatggactggttagagcggtgcgtttctatgaacaggtaaagcgtgagaatccgccagtcgaaactggagtatggaaagacgctattgactgggtgaccaaagaggcttgccaagctgtagacattggcatcaaaggagagtgatatggcaactttgacaaaaaaagaacaagcatggttgagcgaattacaggacgttcttgatcgctgtccatcaccgaaaaaaattggtttttacaccattggcgataaaagcatttacctgtatgacctacgccgcatggatgaaatcatggaggctcttgataatcgttcgtcaatggattggtgtgttgctgtccatgatatgaatgcagggtttgatgaaaagattttgttcccctcatcacttgaaagcacagcaggataaggacccagccaatatacacaacctataaaacactaaagcgcctcaggggcgctttttgtttgcacaaaagtgcacaaatttgcacaatttttttgaacgactttttacccttccggcccgcatggcggctggatccgtcaaggatccgtgcgtgcacaaaaaaacgcgctttttctacgcgcaggtgacgggggaacagcccgcgcttcagggggtaaatagcatcccctgaacggtgtcgcagagatacaacagaatggctgtatttctcacgctgagcgtgaaaaagacgtgagggcttttgctttgatggggtggcagataaggccgtcaaaatcgcactgaggcggcgagaacatgcagtcagcgcagtgggattgcgtaagagtctgaccgtcgatgatggcaataagcaggaaagcgtcgtgaaattatctgattgatacaggagctggagagtcggggcataaattttttatgccccggcgaagcagcagacaagcgaagcgcgtcaggatgtgggctgggtatctaacagtgcgtaagggttaaagcggatcacctcttcgccaagccagtcattgatgtgcttcatggcctccatgacgggcatcagctcgttaattgcgtaaacccgcgcggccttctccacatcaccaaacgcacttttttcgcccggcatcgcccccatcagttgcggcggaacgcggtgcgcagccagcacatcatcacgggatgccgccttaacattcataaactcatcttttgcggtgatctgctggaacggcaaaatttgcaccccctctttgccaccgttgggcgcatgaatgagcacgtttttaaacgcaccaccaccacgtgcaccctgtagcgtttctttcagggagtccatgctttcgcggtttacctgcgctgcaccgatgtagatgatgcacccggcgtgggatccgttgtcgtaatacagttttctgaacatgtccgccgaatgagacaggctggccgagagtaatgcgccgagatattccggcatgccgtagatttcctggttaatgtcaggattcatcaggtggcacactttgccagggcgaaactgaaacgcgtccttgccatcctgcacataccaccatgattcaagatcgcttccgcgtcgcatgtatttcgccagggcgtgccgtaatttaagcggttcgccgagcatattgcttcgaagctcaaggaatgcgttaccgaacacaaaccagtccagcgccagcgccgagaaatcctgccgggaaagcagcgggtgcgggatgtagcaaccgagtaatacattgcgcttaaagtaaagcgcagactgatgccaggacgtttgccgggctgctcttgccagaccgtaccagtccaccggggtttcataccaccgcccgttatcagcacagtacatattgtccagcaggtcatgcccggtcaggcgataaggaccatcaaatgtgaatgcactgagcgatgattctttcctgagcgcatcagcgagatcaatgcgtgaactcatgcgcacttttttattttttctgctcatcagaactccataaccgtgaaacgctcgttttctccttcgccgccaatcggttcgttaatgacagcaagcatggttgcccacgcaaggtcgccgtggctgatccccctcgcgcggtccgtttcgtaagtgataaagccgcccggtgttttcaccttacgcacggcgttaaaggccgcgaccagctcacgttcggcgcgatcgtattcccaccgcccggcacgcattatttgcagcattttcagtaccagcgaccgttttgatgacagcgtgaaggtgtacggaatagcagcagggaaaaaccgcttcactatctgataaacagcctccccgttcccgcccgtcacatcaatgccgatgtgttccacgttgtagcgatacgtgaactcttcaatgactctggcctgttcttcaaactccagcccctgaacgcgtcgcgtctccaccgttcgaaaacggccaccaggaacagccggaggaaccaccacggacacagcgccgctgtcgccgttgccactactgccgtttgcgtcatacccaatccataccggacgattccccatcggtcggggagcaaaaggtttccagtctttccagtcgtcgtatccgtcaacaccgcagccaatcaggatattcaggttaaatgccgattccccttcgcggacaaactcacacatatagagattgaggaactcgtcttcggtgttttcatcacgaatttcgtcgatatcggtgtgtttccagccgtgattaaccacatcttccagcgtgacaatttgccgccacgtccggtcagggcagataagcccgttatgcagcgttttccagtccacagaaaaacgctggcgtttatgcgaggcctttttctcgttccagcggtcgccgttccagtaggcgtatgcctcgtgcgtttcggtggatggcgtggagaagtaggtgcgccgcagtccgctgagggttgccatagcgccagccaccttgcgcagttcagcaaagcgactgacccagaaaaattcatcaaaataaaaattgcccgtataggactgtgccgacgcagcagaagtgccgagaaaatgcagctctgcgccgttggagaggatgattttatcgccccctttcagctccacatcaacttcagccgcggccttctgaataatgcttttaaactggaacgcctgacgacgcgacgcagacaaaaaaatctggttacgctggtaaggttgcgccacatcgtcacgcagcgccatcagcagagcttcctgtgcaaaataccaggtcgccccaatctgtcgggatttcaggatcatcctgttacgtatcccggcttccctgcaaagggtcagggagtcaaaccagccccgctgatgccactccagcctgctgatgattttttcccgcagtgcggaaatctgttccggcgtgaaatgatttttgagttttttcgcccggcctttctttcctgcggccatcacatccggctggccatcatgcagctttttaagctgccgggtcagcaggtctatttccttaaagtcaccgcctgttttattctgtttttcagtaagctggatgaggcgcgcatcgatggactgcgtgacacgctgcacgggtggcgtttcatcccactggtcgcgtttttccacgcataaatcgtgttcgggtttattcccatcagacgtgatatttctgcgggcggataaccctgccagtaaagttgccgcgcacgctggcgcacaaaagcgtcctgaatcattgctccccctgagtaattacaggaagattacccgcgcgcgaaaccgttctccttaaccccctgttctggccgttttcttacaacaaaagccctttgtatcagcctgttacgctttgccatcatgactgaagaaccagtcagaggggcaaaaactatggctaatgaaaaaaagacatcccgcaaaaagtttcgcgtggctgtctccggatcaactgttgatggccgtgaaatcagtccggtgcatctgcgtgaagccgccgagaacttcaacccggatgtttacgctgcccgcgtgaacgttgagcactatctctcgccatgcccgtcaagcgaattttccgcaatgggcgatgtcaccgcactgagtacggaagacattacggaaggtccgctggccggacgtactgcgctgtatgcagaaatcgaaccgaccgagcgcatgaagcagcttgtcgcggacggcaagaaaatctattccagtatcgaactgcacccgcagttcttccgttaacgggcgcgcctatctggtcgggctggcgatgaccgacaccccggcaagcctgggcactgagcgcctgaaattcacggcacagcaacgtcaggcggtaatgacgttcaacagtgtccagggtgaagcgccgcttatctccgaagccatcgagtctgaaatcatcgaaatggcagaacaacgccaggaagaaggcacccagtggtttaaccacgtaatggggattattggccgtggccgcaaagcggatgacgccagtttttcccgtattcaggaagcggtggaaggcgtcgcaacgtcacaggccgacattatcgaccgttttaatgtgctggaaacccgccatcagcaggaccgccagaaaattacgtcactgaccacagagctggcagcactgaaggaaaaactgcgcacgcaggacggcgatccgcagaaccggttcaccgcaacaggtgcagcctccgaccagctggctgacttctgataagacaaaggagcaaattttttatgaatctggtgatgtcagatattacccgcaacaagctgggttgctatatggcgcagcaggcgtcgcttaacaatatcccggtatctgcactggtatcgcgatttaccgtggaacccgcggtgcagcagcgttttgaaaacgcctcaaaggaaagtaccgaatttacgaaaagaattaacgtgatcggcgtgaccgaccagaaaggcgaaaaaatcctcccggacaccaccgggccaattgcgcgcacgaatagcagttatgacggcatcaaacgccgtaacccgaataacgtgatcgatatgaagtctcgtcagtaccagtgcgaacaggtgaactacgatacctttatttcgtacccacagcttgatacctgggcggcccacagcgattttcagtcccgtatcagtacacagatcgcccggcaggtagcgcttgatcgcatcatgattggctttaacggcacatcccacgcctacgagtctgattttcacaccaacaagctgcttcaggacgttaacgtgggctggctggagcacatcagaaccgatgccagcgagcgcgtaatgaatgacgtgacgctgacctcccgcaacatggacaacactgtggcgcacgcgggtaagtatgcgaatgccgatgctctggtacaggatgcgcgctcatccctgctggacgaatggcacaaggaagctgacgacctcgtggtgattatggggcgcaacctgtttaactcgctgcgtctgcccgtgctgaacagcatcagcggccagaatcccaatgcggaattacttgccgggcagctcatcctgtcatcgcgcaccattggcgggctgggcgtgttccttgcgccgttcttcccggatgcaacgatgctgatcacctcgttcaacaacctgtcgatttactggcagaaaggttcaatgcgtcgcctgatgaaagacgagccggaatacaaccgcatcgccacctaccagtccatcaatgacgcttatgtcgttgaagactatggcaagtgcgcgatggtcactggcctgaagttcgccgacagctaatcaactcacggcgggcatcatgcccgcctgtaacggagagaaaaaatgattactcctgcacaacaacactggcagaacgtgatggcacagcgcgcaggccgggcgaatgaaggtgtggaccacgccgcgcgtaccgcgcatgaagaggtgctgtatcgtctgcgtctggcacaggccagactaaagggcgtacaggccagaagcgcgaaagccgccatcaaaaaagagttgttgccggatttttccggctggattgagggaacgctggaagctgacggcgggcagcaggatgaagtgattgccacgctgatggtgtgggcgattgactgtggcgatcttccgcttgcgctgcgtatcggcgcgtatgtggtccatcacaacctcatcatgccggataactttggccgtactgctgccacggtactgaccgaagaaatctgtaatccggtactgacacaggccgggacggatgccgacgcggatttgtccgcctttatcgaaccactggacaccctccgggagattgtcgccaaccaggacatgccggacgaagtgcgcgccaaattatgcaaagcgtgcgcctttgcccgccgtggcctgaccgatgcggacagcatggcctcatcactgaagctgctgcgcgaagcaatgcacctgaacccgaacgcaggtgtgaaacgcgagattgcaaccctttcccgcgccctgaaaaaagccgattccgcagccgcaccagaagatgccagcacaccgcaggcgcaggacgaaagcagcaaaagtaaaaagacaacgcggaagcctgcaacacgaaaaaccaccgcgacgcagaaggcgaagcgcggttaacgactgaccccgtcagcgggcggcgtgcgcggtgttccggtttgactccgtgaccgtttacaccgcgcacccaccgcccgattttttcaggagtgaaccccatgagtatggttgccagaaccaaccccggacccgcagaggacgacataaccgataccgatgatggtgatacccgtatttcagcgggtgcattctggccggatattgtgctgcgtgagctgcgtctggcggtacgactgccgggccgcgtgaccacctcccgcctgctgcatactgccaccggggctgtggctcacgttacccgcgaactggaagcgtggcagcaggaacagcaggcggctggccatcagacgctggccgatgttccggcacccgtaattaacggagaaagcgtcaatctctggcactggcgcaatgctgtttataccgccacacgtgccctgattctggagcgttaccgcgatgcggacacaacggacaagggcgatcgccgggcggacgcactggatatacagacatcggatttgtggcgcgatgtgagctgggccatctctgacattctgtgccgcccgcgaatctttgcggagttgtgctgatgaaagtgaaggcactggaaggcgacaccgtggattcgctctgtttccggtactacggcacgacgcagggcgtcaccgaaaaggtgctggatgccaaccccggactctgtcagcaggtatttctggacgccgggcaggacgtggagatgccggagccggagaagaagaaacgagaaatgattcagttgtggggggagtagcagtgagcaccattcaaacagggatcacagagcaggttattgcgtggctctttgaccacctgccaacggtgtatgcagtaggcgcggcggtcagcatttccgcgctgatgagtctttatgacggacgaacactggttcagaccgtaacgggatcgctggcgtgcggcgttcttgccatggccgtggccgggtcgttgcgcttcttcggttttcctgaagatgccgtgacgtttatcggcgcatcaatcggttttatgggcgcagagaaagcacgcgacaaggttattgcggcctttaatcgcagggtgaaggagaaggacgaatgagcaacacatttaaattcagcagccggagcgaaaagaatttgcagggcgtaaatcctgatctggtgaaagtgacccgacgggcgctggaaatctcggaagtggattttggtatcaccgaaggattgcgcggtcgttatcgtcagaagcagctcgtgaccacaggcaagagccagaccatgaacagtcgccatctcacagggcatgccgtggatgttgtggcttatgttggcagccaggtgtcatgggaatggccgctgtacgaaaaatcgcagcagcattcagacaggccagccgggaactgaatattccggtggaatggggcggcgactggaagaccctgaaagacggaccacattttcagttaccacacggagcctatccggcatgaagctctggcccacgctgggtgtcgctttccttctgattgccgcatggggaacatccatgcgtctgtcatggtcgcttggccgggagaacgccagaaacgaagcacaggccagcaccctgaaaagtaccgtcgacacactgaatatcatcagtgccggggtacaggatatgcagcaggtgctggcgcaactccgcgtggaaaatcaacagcgaaatcaggacggagaggccagacgtgaacagctacgcaacgatattgcaaaagatgaatgcgcccacgctttgcctgacgctcgttttactgacaggttgcgcaggcacgcagaacgcgccagggccagcgccgtcagtccggcttataccgcagacgctgaccatgccggtaacgcctccccccttccctgacccacccacatggggaaacctcggaatatggggcgaccgccttctggatgcactggaaacctgtaacgcggataaacgggccattgctgaactggataagagaatagccgaactgacacaccagacgggagtaacacaatgaccagtaagaactttgcactgattacagccatgacacaggctgaactgactcaaaaggtgaatgaacatcttgcgaaagggtggcatcttcagggggagacgcgggttgcctacgaacccggcaccccgtggtatctaatgcaggcaatggtggccgatggcactacagacatctcacctgattcccccagcacggcagcgtgccggagtggtattacgtggt

SEQ ID NO: 183 - DNA, 453 bp, Escherichia coli
  modified_base (39)..(42): a, c, t, g, unknown or other
  modified_base (50)..(52): a, c, t, g, unknown or other
attggttctcatcagcacactgtcggtattggtgcacannnncactccgnnncgattggctcacatggacacaccatcaccgttaacgctgctggtaacgcggaaaacaccgtcaaaaacatcgcatttaactatattgtgaggcttgcataatgacattcagaatgagtgaacaatcacggaccataaaaatttataatctactggctggaaccaatgagtttattggtgaaggtgatgcatacattccacctcatacaggtctgcctgcaaacagtaccgatattgccccgccagatattccggctggcttcgtggccgttttcaacagtgatgaggcatcgtggcatctcgttgaagaccatcggggtaaaacggtttatgacgtggcatcaggggactcgttatttatttctgaactcggtccattaccggaaaatgttacctggttgt

SEQ ID NO: 184 - DNA, 156403 bp, Escherichia coli
  modified_base (40)..(40): a, c, t, g, unknown or other
  modified_base (52)..(52): a, c, t, g, unknown or other
  modified_base (42251)..(42251): a, c, t, g, unknown or other
  modified_base (42257)..(42257): a, c, t, g, unknown or other
  modified_base (42259)..(42262): a, c, t, g, unknown or other
  modified_base (42267)..(42267): a, c, t, g, unknown or other
  modified_base (42270)..(42271): a, c, t, g, unknown or other
aaggtggtttcacgacactgcttattgctttgattttatncttatctttccnatggtacccggagcgggacttgaacccgcacagcgcgaacgccgagggattttaaatcccttgtgtctaccgattccaccatccgggctcgggaagaaagtggaggcgcgttccggagtcgaaccggactagacggatttgcaatccgctacataaccgctttgttaacgcgccaaattcttcaggcctttcagccagacatccgcttgaggccgatgtcttttaaactggagcgggaaacgagactcgaactcgcgaccccgaccttggcaaggtcgtgctctaccaactgagctattcccgcattcatcaagcaatcagttaatcacttgattttattatcgtctggcaatcagtgccgccgttcgatgcgttgcattctacttacctggcgcgatgagtcaacgatatttttcaccacttttgatcgtttgctgaaaattacgccgaaacgatcactgatcaagcaaatctgcacgcgcagcgctcaaatattgcaacattgaccacagagtcagtaccgcagccacaaagaaaagtgcaataccggcgtactcaacccaaatgttcggacgccacagcagccaggccaacgccaccatctgggcagtggttttcactttcccaatccaggagacagccacgctactgcgtttacccaactccgccatccattcgcgtagcgcagaaataataatttcacgggcgatcatcgttgccgccggtaaggtcacccaccagctgtgataatgctcggttaccagcaccatggcgatagccacgagaactttatctgcgacagggtcaaggaaagcaccaaaccgggtactctggttccagcggcgtgccagaaaaccatcgaaccagtcagtcaccgccgcgacgcagaaaatgagcgcggcggcaaacggcgaccaggtgacaggcagataaaagaccaatacaaagaatgggataaggatgacacggaacagtgtaagcaacgtagggatattaaattgcataatgacgggtaactatctgttgtcagtaagattacccctatgttgctacagagacatcaatgtttcaacgaccagaagatcttttctgccagaccttgcgaaatacccggcacttttgcaatttcctcgacgctggcgttacgtaaaccttgcaaaccgcccatatatttcaacaacatttgccgacgttttggcccgacgccttcaatggtttccagggaactggtatttttgaccttcgcccgttttttacggtgcccgccaatcgcgtgatcgtgtgattcatcgcgaatatgctggataacatgcagcgcgggagaatctggcggcaaactaaatccctcaccttccggctcaaagaacagcgtttccagcccagccttacgatctgctcctttggcaacgccaagtagcagcggatgatttttatcccatgagacatccagttcggcgaagacatttttcgcctgcgcaagctggcctttgccgccgtcgataaggatcacatccgggatcttactgtcgtcaatggctttaccataacgccgacgcagcacctgattcatcgccgcataatcatcgcccggcgtgatgccagtaatgttatagcgccgatactccgcacgcagcgggccgttagcatcaaacaccacacaggaagcgacggtttgttcgcccatggtatggctgatgtcaaagcactccatccgcttcacttccggcaatttcaacacgctggcaagcgcggtcagtcgctggtgaacggtagattgctgcgaaagtttgctggttaaggccgtcgccgcattggtgcgcgcgagtttcagataacgcgccctatcgccgcgaggtttggtttgaacattaatcttgcgtcccgccagttctgaaagggaatcggcgagcagcgttttatcgctaagattaaaatcgagcaggatctcacccggtaaggtgcgcatctggctgccttgtaaatagaactgacctacgaaggtttccaccacctcgctcagttccgtaccgccaggcactttcgggaaatagctgcggctgccgagcactttgccctgacgaatgaacaatacgtggacacaagccatgcccgcatcgaacgccacaccaataacgtcaaggtcgtcgccggtattggaaacaaactgtttttcggtgacgcgtcgcaccgcctgaatttggtcgcgaatacgtgcagcttcttcaaactccagattctggctggcagtttccatacggctaatcagttgcgtaagcacctgatcatctttgccagacaaaaacaggcgcacatactcgacctgctgagcgtattcttcttcactcaccagtccttcaacgcacggccccagacaacgtcctatctgatattgcagacacggacgcgagcgattgcgataaacactgttttcgcactggcgaatggggaaaatcttttgcagtagcgccagtgtttcacgtacggcatagccattcgggaacgggccgaaatattcacctttagcatgcttcgcaccacgatgcatcgccagacgcggatgggtatcgccactcaggaagataaagggataagatttgtcatcgcgtagtaaaacgttgtaacgcggctgatagagtttgatgtagttgtgttccagcaacagcgcttcggtttctgtatgagtaaccgttacatcaatttgctggatctgggcgaccagcgcttcggttttgcgcgaagcgaggttgctacggaaatagctggaaagccgttttttcaggtctttcgctttgccgacatagataaccgtaccaccagcatcgtacatgcgataaacgcctggctggctggttacggtttttaaaaacgcttttgcgtcaaactgatcactcactgacttgataatgtctccgcattacacagaccatggcgaattgccaggtgagtcagctcaacatcgccatgaatgtttagtttactgaacatacgatagcggtagctgttcaccgttttcggactgagattgagctgttctgagatctcattgaccttctggcccttggtgatcatcagcataatctgcaattcacgttcagacaaactggcaaatgggctttctgttttttctggttcgatctggcttaacgccatttgttgagcgatatcagaagcaatgtaacgctgccctgaatagacagaacgaatcgcactcacgacttcctgcggagccgcgcctttgctgaggtagcccgcagcaccggcctgcatgactttcgctggtaaagggttttctgtatggacggtaagcatgatgattttgacatcagctgtggaacgcgcgattttacgcgtcgcctcaagaccgccaatgcccggcatactcatgtccattagcaccacgtcaacggcatttgtccggcaccacttaacggcgtcttcaccgcacgatgcctcaccgacgacttttataccctttatatcttccagaatgcgtcgtatccctgcgcgcaccagttcgtggtcatcaacaagtagaacgttgatcaaaggaatatctccagaaatagggataacgctactgatagttagtcattcgtatattagcggtttttattgcaactttgaaacgttaaaaatggtgggtattcgatttttctctcgtttttgtcaattcgattgtccacagttatggtcacgcccgtcaccaacggctgaccggatcgtttcacagtaagccctgcgacgaaatgtgacaaaaattacctttattcagcaaaaatgaaaatcagcccgctgaatatgtaacattaattaacccaaacaatacgggcaaaaaacattcatgataaaaatatttattggtcattatattaacgcatttaatagcaccgttgacgatacgctcaaaaaacaaccactgctatttttagcaaagcttatggtatactccgccgccttaacatttttcaccgcaaattttcattgcaacatgacgaggaaaataaatgagtacgcctgatttttctactgccgagaataatcaagaactggcaaatgaagtctcctgcctgaaagcgatgctgacgctgatgctgcaggcgatgggacaagctgacgcgggccgcgtgatgttaaagatggaaaaacagcttgcgctgatcgaagacgaaacccaggctgcagtattttccaaaacggttaagcaaattaaacaagcctaccgtcagtaatataaaaccggctgagagcgtgcctttcagccggtttttgcatctggcacgcagaacagaaaagagatcaaattaagccagtagcggccgcgtaacaggcaacctgcgtcttatttggtgcattaatttttttctgcatgtttttctggtggaaattgaccgtattctcagagattgacaaaatcatcgctatctctgctgatgtcttcccttccgccgtccatttcaaaatttctttttcgcgcttgctgaaattcatctctggcgtcatcactatttcatcatttaaacgcatcagagccatcagactttcgcgcaccagtaactgcatttttaattgcagttcatcactaagaatgggtatttcgcgcgcgctgctacgggaaaaggacaaaaagcccagcgcccggtttggcagcattaaatactgagtgacaccgcggcgtaaaccatgtgcgcgcgcggcttcccataacggctgtgcttcgctgaataagtcatcattccacattaaatggccctgactaaagttttcagggttcagcaccggatcaattgcgagaaagttttttgcctgataataactaacccacgcctcagggtaattggtgtagaaagccactttaggtcgcgtgaatggtaccgggtggcgaacacataacgaatagtaatcgtactccagctgctgagcctgaaactctatttcatggtagacctcttctgcggcctccatcctctgaaaacgcaacagcatcgtgcgacgccagctgaaaaaatccttatcctgcatagtaaaccgcaacgcccctgagagtgagtatcatttataatgataattcaaactatcacataaataagatttatatataatttatattattcaggcaatgaattacttttgcaagccatcgcattctcttatgttattaatgagttatgctgatttgttaagcagttttatcaggcttgaaatggcgtccagccccgacaggtgaatcgtcggggctgattttttcttattattgcagcagaaacttctcgaggaactggcgggtgcgaggctgctcgggatcggcaaataacgcttttgcggccccctgctcgactatccgcccctggtccataaagatcgcccggtccgcaacatcccgggcaaagctcatttcgtgcgtcacaatcaccatcgtgcgcttttcctgcgccagctgacggatggtgttcaggacttcgcccaccagctctggatccagcgccgacgttggctcgtcaaacaaaatcacctcaggacgcattgccagcgcacgtgcaatcgcaacacgttgctgttgaccgccagacaaacgacgtggatagctggtttctttaccggccagcccaactttcgccaacagctcgcgagcgcgcgccgtggcctcttctttcggttcgcctttgacgatcaccggcccttcaataatgttttccagcaccgtacgatgcggaaacaaattaaagttctggaagataaacccgacgtgctgacgcaactggcgaatcagcgatttttgctgacttaatgaacgtgcagtatcaatagtgatatcgccaacggtgatcgttcccgcttcgggttgttccagcagatttatgctgcgtagcaacgtggttttgccggaaccactcggaccgataattgccaccacttcgccaggctttacctcaaggtcgataccgtgcagcaccgtctgaccgtgaaattttttcaccaggttcttaacttcaatggcactcattttggttctctctcctggcgattaagttgattctcaaaatggttctgcaacgtcgataatactgtcgccatgatccagtagatgagcgaagccgccaggtacatggtgaacacctccagcgtgcgcgaggtaatcaactgcgcctgacggaacagctccggcacctggattgtcgcggccagcgacgtatcttttaccaggctgataaagctgttcgacagcggcggcaacgccacccgcgccgcctgtggcaaaatcgcgcgacgcatggtctgccacggcgtcataccaatactggcagctgcttcccactgacctttatcaatagaagaaatggcggcgcgaagcgtttcggcagcataggcggcagtgttgagcgacagaccaatcattgctgacggaatgggatctaattcgataccaaactgcggcaggccgtaataaatcataaacagttgtgcgatgagcggcgtaccacgaaaaatagagatataaaaacgcgccagccagcgcacgggccagatcggcgacaggcgcatcagcgcgagaataaacccgagcagtaagccaaaaaacatgccgccgatactgagttgcagcgtatacccagcccctttcagcaggaacggcaaggaatcaataaccagttgtatactttcttgcatgagcgtttccggagctaaacgtggggatgataggcgaacagcgcaggcgcgccgccggtatgaataaacagaatcggcccttcatctttgaagcgtttctgactgataccgtcaatcagccccgccatcgcttttccggtatacacaggatcaagcagaatgccttccagccgcgccagcaatttcactgcttccatgccttcatcgttcggcacgccgtagccaggtgcaaaatagtcatcccagagtaaaatttccgctgatgcggtcagctccagttctttcgcaatcgcctgttgtaggttaaccactttcggcaattgatcggcaacggaacgcgacacggtaacgccaatcagttcgctttcaggcataaggtgttccagcccaacagccagtccggcgtgagttccggcactgcccgatgcgaccaccaccgacgaaatattaaccgccccttcacactgttgcgcgatttccagcgcactctccacataacccagcgcgcccagagcattagaaccgccaaccggaatgacatacgggcgaaagccttgtgcttcgactcgcgtcgccagctcttccagttgggcattgggatcggtcagtgcgtcacacatttcaatctgggtattgaacagatccagcaacaaacgattgccgttggttaaatagttttctgcggttgtgccaataggattttccagcagcgccacgcagtgcagaccgagtttcgccgcaactgcggcagtctggcgcacatggttagactggatcgccccggcagtaatcagcgtatcggcaccttcgcgcagagcatctgctgcgagaaattccagcttacgtaatttattgccgcccattgccatgggggtgacgtcatcccgtttgatgaaaatttcccgtccaagataatcagaaaagcgcggcagatattcgagcggagttggcgcgccgataaactccagccgtggaaaacgggttaaattatgcagtggcataacagcctccgatgtgtgttgttgtgattttcttattatgcacgctgaaaacgcgtaaataaaaaaggcgctagtgaaagcgcccttttttgtcattatgctgattatttggtcacatcagcaccaaaccatttttcggaaagagcttgcagagtgccgtctttttgcatttccgcaattgcatcattcaccgctttcagcaggtcttcatttcctttacgcagcgccacgccagactcctgacgggagaatgcttcaccggttactgccagcgtatcgttggttttcttcaccagatccagcgccgccagacgatcaacgaggatcgcatcgatacggcctacgcgcagatcctgatatttggttgggtcatcatcataggtacgcacatcgacaccctgaacattctgccgcagccactcttcatagttggtgcccaggccgacacccacttttttgcctttcagatcagcagccgttttaatggtgccttcgttaccttttttcaccagcgcctgaataccggaaatggtgtaaggggtagagaaatcgtattttttcttgcgctcgtcagaaatggtgacctgattaatcaccacatcaatgcgtttagagtccagcgacgccagcataccgtcccatttggtcggttttagtgacgcctcaacgccaagatgttttgccagctgttgggcaaattccacttcaaaaccggttaatttgccgtcatccccctgaaaactgaacggcggataagtgccttccagccctaccagcagcgtgccgcgctctttaactttattaagcagaccttcatctgcaaaacttttaacgctcatgcccgcaaccagcgctacggccatcacactcatcaatgcctgacgtcccagatgtgctaatttcatatttaccccgaatgttgttatgtctgtttgcagtgtagagccattgtttgtaaacacaaaaacaactccgctacatcttattcttatttaatatatatcagaagcaggcaggctggaggatttctgcacaagtccggtacacgtttgacgctgatagtgttgatacttccgtaatgcgatgcggtaattgttggtgctggtggtgggcagccacggggcgaggatttcatcaaggaaaccgtcccgcagctgatcgagggaaatattttgctcgtgtagatgattccccaaacggcgcagacgaacgacatattcacgcaccgtacctgggctcatttcagtttgctcaaaaagaaattgcttaaagccgataatatcgaaaaaatcactctgcgttttgcagtgtaaatcaccgcaaaatcggcacaatgccgcccatgatttttgttccgtttgccagccattttcatcaagcagcgcgtccaggcgggaaatctcgattttattcactattttgccgtcgcgaacgagggtaatgcgatcgagtaatttacggcaatgcgcgcaatgagtctggctgtgtttaaagtctttaagatagcggcttaatggccgtcttttcaggtgctgcaccatcattaagaactcctggtagtcaaagttaaagtgcggcatttactgacgttataacttacccagtttagtgcgtaaccgtttaatagcctggctgtgtaactgactgacccgcgattccccgacctccagcaccgcgccaatctctttgagattcagctcttcctggtaatagagggttaataccagtttttcgcgctccggcaacgtttcgatggcttccatcacccgctgacgcagattactgtccagcagttgttgtagcgggttttctcgctgatgatcatcagtaaccagttcgatgctatcgccgtgctcttcgcgccactcatcgtaggagaagagctggctgttattggtgtcgagcaacatttggcgataatcggcaatatcgatccctaaacgttccgctacctcagtttccgtggcgttgcggccaagttcctgctccagttgccctattgcctgtgccacttcacgcgcgttgcgtcgcacgctgcgcggcacccagtcacggctgcgaagttcatccagcatagcgccacggatacgctgcactgcgtaagttgtaaatgccgttccttgtagggcgtcatagcgttcgacggcattaagtaacccaatgccgcccgcctgtagcagatcgtcaagttccacgctcgcgggcagtcgaacctgcaggcgcaatgcttcgtgacgcaccagcgggacataacgctgccacagcgagtgtttatccattacaccttcagcggtatagagtgaattcacgataaacagccctgcgttatatgagttatcggcatgattatccgtttctgcagggtttttaatcggacgattagtgggtgaaatgaggggttatttgggggttatcggtaaattgcgggcagaaaaaaccccgccggtagcggggtcaggcaggttaaggccattagccttgtaacagagacagaacttgctgcggtacctggttggctttagacagcacggagttgcccgcctgctggataatctgcgctttcgacatgttggacacttcggtcgcatagtcggcgtcctgaatacgggactgcgcttcagacaggttggtggtggtgttgttcaggttggtgaccgcagaatccagacggttttgaacggcaccgagggaggagcggaatttgtcgactttagcgattgcggcatccagtgcttttaacggatcggctgtagcggctcccgccacttccgctgcaccaacagttaccgccgccgccgtaccggtaatgactacagtggcttccatgtatttaccggttgcagaatcaacgaccgcatatttagtactgttagacgcggtgtcagtgtaagacagtaaattgacttgtttacccccagcatccttgacatccgcagcagcaattgctgtaccatcagcagccgtcagtttcgccgcgctgaaatccgccatgccggacacggtaaatcctttcagattcaaagtggtactgtcgatttgttgcaagccaatgctgatcgtctggttatcattggcaccaatctgaatcttcatcgaatcgtttttcgacagcacgttcacaccgttgaactgggtctgaccagatacacggtcaatttcatcaagacgggatttgatttcgtcctgaatagaagacaggtcggaatcagagttcgtgccggtagaggcctgaacggtcagttcacgaatacgctgcaagttgttgttaatctctgacagcgcgccttcagccgtctgcgccagagaaataccgtcgttggcgttacgtgcggcctgagtcagacctttgatgttagaagtaaagcggttagcaatcgcctggcccgcggcgtcatctttagcgctgttaatacgcagaccagaagagaggcgctcgatagaagtcgacagcgcagactggtttttgttgatgttgttctgagtgatcagcgagaggctgttggtattaatgacttgtgccataattcattttcctgttttcaagtctacggtttaagtattggcttccacccttcggcttcgtcgccgtcaaccctgttatcgtctggtcactcacaacctttagaatttttttctagcggtcgaaatactccccttcctcgttgctgttcgtgccattaaggcaaaaaataaatcgtaaactttaccccgcttacgccgataaccccggtattcgttctatacacgtcgcatgattaaggaaactatatggctagtatttcaacgcttggggttggatcggggctggacttaagcagcatccttgacagtctggaggcggcagaaaaatctaccctgacgccgatatcaaaacagcaaagctcttacaccgcgaaactgagcgcctacgggacgctgaaaagtgcactagagagtttccagacagccaacacagcactgaataaagccgatttatttaccgccacctcaaccaccagcagttcatcggctttcagcgccaccaccacgggcagcgcgattgctgggaaatacaccattagcgttagccaactggcgcaggcacagacgctgacaacaaaaaatagtcaaaaagacagtaaagccgccatcgccaccagcgatagcgtactgaccatccaacaaggcggcggtaaagatccggtcacgattgatatcagcgcgggtaactcgtcactttccggcattcgcgatgccattaacaacgccaaagctggtgtcagcgccagtatcatcaatgtgggaaacggcgaatatcgtctgtccatcaccgctaacgatacgggcagcaataacgctatgaaacttagcgtcagcggcgacagcgccctggaaagttttatgggttacaacggaacgccgggtgatagcagcaatggcatgattgaaagcgtcaccgcgcaaaacgccaaactgacagtcaataacgttgagattgaaaacagcagtaacactatcagcgactcactggaagatatcaccctcaacctgaatgacgtcaccaccggtaatcagacactgaccatcagtaaagacacatccaaagctgaaaatgcggttaaagcgtgggtggatgcctataacacattgcaggatacattcaccagcttaaccaaatacaccgctgtcgatgccggagctgaaagtcaggactccagtaatggcgcattactcggtgactccacactgcgtaccatccagactcagcttaaaaccttgctcgccaatactcacagcagttcaaactataaaacgctggcacagattggcattaccagcgatgccagtaccggcaagctggaaatcgcgaccgacaaactgcaaacggcgctaaaaaatgatgccgctggtatcggtgaaatgtttataggtgacggcaaaagtactggggtaaccaccggcattagtaacaacctgaccagttggctctcttccaccgggataatccaggcagcaaaagatggcgtcagcaaaacgctgaataatttgaccgaccagtacaacgcagccagtgaacgtatcgataccttaatgacgcgctataaagcccagttcacccaattagatgtgttaatgaactcgctgaactccactagtagctatctgacacagcagttcgacacctcaaatagcaactcgaaataatcttcaggagagactatgtacgcggcaaaaggcacccaggcctatgcacaaattggcgtcgaaagcgccgtaatgagcgccagccaacagcagctggtcaccatgctatttgatggagtgctgagcgcactggttagagcgcgcctgtttatgcaggacaacaatcagcaaggcaaaggcgtctctttatcaaaagcgatcaacatcattgagaacggactgcgggtgagtcttgatgaagagagcaaagacgaattaacccaaaacttgattgctctttatagctatatggtcaggcgcttgctgcaagccaatttacgtaacgatgtctccgcagtcgaagaagtggaagcattaatgcgcaatattgccgatgcctggaaagagtctttactctccccttctttgattcaggacccagtctgatgaacaatgcaccgcatttgtatttcgcctggcaacaactcgtcgaaaaaagccagctcatgttacgcctggcaacggaagaacaatgggacgaactcatcaccagcgaaatggcgtatgtgaatgcggtgcaggagatcgcacacctgactgaagaggttgccccgtccactacgatgcaggagcagctccgcccgatgctgcgcctgattctcgacaacgaaagcaaggtaaaacagttattacagattcggatggatgaactggcgaaactggtcggtcagtcatcggtgcaaaaatcggtgttaagtgcctatggcgatcagggcggctttgtgctggctccgcaggataacctcttttgaatcttaatgagccgatggctcgcgaataatccgattacggctacgcttctaatattccccttgaatggagtcgaagaatgcgtaatcccacgctgttacaatgttttcactggtattacccggaaggcggtaagctctggcctgaactggccgagcgcgcagacggttttaatgatattggtatcaatatggtctggttgccgcccgcctataaaggcgcatcgggcggctattcggtcggctacgactcctatgatttatttgatctaggtgagtttgatcagaaaggcagcatccctactaaatatggtgataaagcacaactgctggccgccattgacgccctgaaacgtaatgacattgcggtgctgctggacgtggtagtcaaccacaaaatgggcgcggatgaaaaagaagctattcgcgtgcagcgtgtaaatgctgatgaccgtacgcaaattgacgaagaaatcattgagtgtgaaggctggacgcgttacaccttccccgctcgtgccgggcaatactcgcagtttatctgggatttcaaatgttttagcggtatcgaccatatcgaaaaccctgatgaagatggcatttttaaaattgttaacgactataccggagaaggctggaacgatcaggttgatgatgaactcggtaatttcgattatctgatgggggagaatatcgattttcgcaatcatgccgtgacggaagagattaaatactgggcgcgctgggtgatggaacaaacgcaatgcgacggctttcgtcttgatgcggtcaaacatattccggcatggttttataaagagtggatcgaacacgtacaggaagttgcgccaaagccgttgtttattgtggctgaatactggtcgcatgaagtcgataaactgcaaacgtatattgatcaggtggaaggcaaaaccatgctgtttgatgcgccgctgcagatgaaattccatgaagcatcgcgcatgggtcgcgactacgacatgacgcagatcttcactgggacgctggtggaagccgatccttttcacgccgtaaccctcgttgccaaccacgacacccaaccgttgcaagccctcgaagcccccgtcgaaccgtggtttaaaccgctggcgtatgccttaattttgttgcgggaaaatggcgttccttcggtgttctatccggacctctacggtgcacattacgaagatgtcggtggtgacgggcaaacctatccgatagatatgccaataatcgaacagcttgatgagttaattctcgcccgtcagcgtttcgcccacggtgtacagacgttatttttcgaccatccgaactgcattgcctttagccgcagtggcaccgacgaatatcccggctgcgtggtggtcatgtcgaacggagatgatggcgaaaaaaccattcatctgggagagaattacggcaataaaacctggcgtgattttctggggaaccggcaagagagcgtagtgacagacgaaaacggcgaagcgaccttcttttgcaacggcggcagcgtcagcgtgtgggttatcgaagaggtgatttaaatccatccccggcggcaagccggggagatttcattacggcagtggcgtcggtaacggcgctttatccagcgcggcggcacactctgccgtcgggcgatccacacgctccatcgtcataccatcgtactcaatggtgttaccgtcacgctcaacctcgtacagctcacgttttacggtaacgttagtgagatcatcagacatcaatgtcaacttacccggcacggcaatcacccgctgccactgacggcaatccagggtatcgccctctttagtgacaatgaggctgcctatcgcttccggactgaccaacgcacgttgcggccctttggtctgccagtagcccgccagccagtccggcgcgggggttttcacgacattgttatagttttcgacttcggcacagcccgccagcaacatgagcgcacctgcaattgcgagtttttcatcattcgtcctgcatgagaagaaaagaggattgtggcattaaagcctgatgtcgccagcctttccaggttcagagagaaatttgatctaaccattatttttgtgaattattaccccgaaaataaatttgcatggtgtatgattcgcgactcttgtttcaaaccttctgagttcagaggctacattcatgtcatggcagcaattcaaacacgcctggttgattaaattctgggcgcccatccccgcggtcatcgcggcgggtattctctccacttactattttggcatcactggcaccttttgggctgtcacaggtgaatttacccgttggggcggtcagctcctgcagttgttcggcgtccatgctgaagagtggggttattttaaaattatccatctggaaggatcgccattaacccgcatcgacggaatgatgatcctcggtatgtttggcggctgttttgccgcagcgctgtgggccaacaatgtcaaactgcgcatgccgcgcagccgtatccgcattatgcaggccatcattggcggtattatcgccggttttggcgcacgtctggcaatgggctgtaacctggcggcgttctttaccggaattccacagttctcgctgcacgcctggttctttgccatcgccactgccattggttcatggtttggcgcgcgctttacccttctgcccatcttccgtattcccgtgaaaatgcagaaagtttctgctgcctcaccgttgacgcaaaaaccggatcaggcgcggcgtcgttttcgtctcgggatgctggtctttttcggcctgctgggctgggcgctgctgacggcgatgaaccagcccaaactggggctggcaatgctgtttggcgtcggctttggtttactgattgaacgtgcgcaaatctgctttacttcggcgttccgcgatatgtggatcaccggacgtacccatatggcgaaagcaatcattatcggtatggcggtaagtgccatcgggatcttcagttacgtacagttaggcgttgaacccaaaatcatgtgggcgggaccaaacgcggtaattggtggtttactgtttggttttggcatcgtgctggcaggcggctgcgaaaccggctggatgtaccgcgcggtagaaggccaggtgcactactggtgggtcggtctgggcaacgtgatcggctcaacgattctggcgtactactgggatgatttcgctccggcgctggccaccgactgggacaaaatcaacctgctgaaaacctttggcccgatgggcggcctgctggtgacatatttgctgttgtttgctgctctaatgttgattattggctgggaaaaacgcttcttccgccgtgcggcaccgcagactgctaaggagatcgcatgaaaaatatcgttcctgattaccgtcttgatatggtgggtgaaccctgcccttatccggcagtcgcaacccttgaggcgatgccgcagttaaaaaaaggggagatcctggaagtggtgagcgactgtccgcagtcgatcaataatattccactggatgcgcgtaatcacggctatacggtgctggatattcagcaagacgggccgaccattcgttatttaattcagaagtaatccctcattcccgctgtggcccacagcgggaatatcgttgcctctctatcacatagatttaacccgccccctctcctattcttttcagtgtgacctcaggaggtttctatgtgtggacgctttgcccaatcccaaacgcgtgaagattaccttgcgcttctcgcggaagatattgaacgcgatattccctacgatcccgaacctattggcagatacaacgtcgcgccgggaaccaaagtccttctgctcagtgaacgtgatgaacaccttcatctggatccggttttctggggatatgctcccggatggtgggataaaccgccgctgattaacgcccgcgtagaaactgccgcaaccagtcacatgtttaaaccgctctggcaacatgatcgggcaatctgttttgccgatggctggtttgagtggaaaaaagaaggcgacaaaaagcagccttattttatctatcgtgctgatggacaagctgtttttatagccgcgataggtagcacaccgtttgagcgtggtgacgaagccggaagaagtttttgtaagcccgctcagggtctttcagtgactgttgcaatggctgtgagggcgaatctttaagccattgcgtttcagtggcatttttccactcaaccaaccaggaagccattttcccgtaagggatgtatttattaccggcctcatgattctcattctgaagcgccagagcacgattgaaaacgaaacgacatgcgcctgcgaagcgcctcatttcacgctcctgttgaccacctggtcttaaccggaatttgaatgcctgtagtcgtttcatgggccaaatcatactttggcctatgaaaaaagaaaccgatatccgacgcggaaggcattgtgttttcctgaagcatgttcacctagtcttcgttactaaataccgacgtcagatttttgaccatgacgcgacagaaaaactacgcacttacttttcaaatgtatgtgctgattttgaagctgaacgggttgaaatggatggcggaccagatcacgtccatttgttaattaactatcctcccaaactggcgatatccagtctggtaaacagcctcaaaggcgtatcgagtaggttactgcgacgagatcgaccagatattgcagtcaggtattacgacaaaggcgttttgtggagtcctggctattttgtcagtagctgcatcttaacgtatcaactagatttaataacaacgatatccgcacctaaccggatatctaatgtcataagcatccctttaattatcccctcaacctcttgtaactttcccactcttgagctccacatagtccaaacgccggatgcaaaaaaatcacacgtgcatttctgaaattgtgatggaggaagatagtatcaattatatgtgcttagaaacgtccccgattagcgcagaagtcaccggattgttcagactccaataggttgagtatgccgtatttattttccaaaataaaaatcgatgctgttgctccttcataaaatacttttactctctggacgcttttcttagctctcttggtgttatcttaaaacgattatggaacctttcagtaaaacgagaaggacacttgtaaccattttccctggcaatctcgctgatgggttttactgtcgtttgtatagcagacaacgcattatttaacctcacgtcgtccaatatactttgaaaacttactccctcgcttgccagacggcgatgcaatgtggaaacagaaatgtagagatatctcgctaccttgtttgctgtccattttgttccaggttcggatagcattaggttataacaacgacttattaatgattgtttactatctgataaaagtaaacaattaacatgatgtgctcctaatgaaagtagaacgcccattgctaagtgttcctgaatttgcgttgagaagcctcgggaaatagatgtttttagttgctcccaacaatatattaactcggggttctgaggtaagcagaaacctgtcgtgttacgaatttgatcagttatcgcataaaatttttgaaacttttcaattagatcaatgggataataaagcatttctgcaagataaagacctgcttctggataattcgcaatataaaattcatatccacagggaaataatattatctgattattatcaacagttagactatgcgtctcccaattgataactttttttccctgacggatacgacataaagctggcataagaggcttaaccctgtgaatctcatgatgtttatgcatccgtatttcttcaatctttaggttagtcttatcttttgccagcatactcttaccctactttatctcataaactggtgttatctcagcggttgcaattttattggcattaaacatataaccaactaacgctccgctggaattagaatccacaggaattttatcagtttttagagcccatactttaaactggtaatgatggggtttatctcctttgggaggacatgctccaccaaatcctgcataaccaaaatcatttcggccttgaacagcaccagtcggaagttttgtaccatcacgtcttcctgcatcagcgggcaaatatgttacagttgctggaatattagcaacagtccagtgccaccatccactgcctgtaggagcatctggatcatacacagttacggcaaagcttttggtgccttcaggagcaccagaccaagttaatgagggcgatgtattaccaccttcacacccaaatccagaaaatacatgagacgttgtaagttgctctcctgtttttatttcattactagtgacctgaaatgctgcggcctgcgcagaaaatgttatgaatgccaatacacttgaaacgataagttttttcataaaaacctcattgttgtgacctatcgttattttatttgatgtgccttgatctcattatgcataaaggcgcaatgatcgcgcaaatgcaatcataattataaaggtgccccgaacattagccataatatgcacaaatcagattcctgttatctcaaggataattattttttaatgcggtgcacttcgtgacaacaagttaatgactaacacaccggcacaaatcaacatcatgcctatgatagctggcaggtccagtcgttgaccaaaaaatccccaggaaagcaaactaatcagaacgataccgacgcctgaccagatagcataagcaatccctgtaggtatataagccagcgtctgagctaataaccagaatgatgcacaatagcaaataattgtgccaacagagggccataaccgtgtaaacccctctgaaaacttcattaaggttgtaccaatgacctctgcaagtattgcgccaccaagataaatataagggttcatagcatattctttcctgttcatactggagagaattgtactacagtttgaacacaactcaccgttttcatcctggtgtatgtgtatccagggggctctggcgtggcaagagataaaggcaggaacaataatgatcagaaggaaccccaggctaacgaatgagttcactcttcctgggagcaaagcgaagacaaaacatgttatcgcgtttacggatcgtggatggcagaaaactttcaggatcaggtatccattttaaaccagaaattgagtgagtttgccccatccatgccccacgctgtgggatcggatataataaacaagcatagtcaacaggttacaaaacctacacctgcatggacatcacttcctgatacgccgccaccagcttattacgcacctgaatccccatttgcatagaaactgaggctttttgcatatcggtcatcacatcgtttagcgccacgccgggctcaccgagggtgaatttttctgcctgcgtgcgggcggctgtttgtgtatcgcttatgcgatcgagcgcggcgtgcagctgcccggcaaaactaattgtcggttgcggcagtgattcctgcgcacgcgcactcatcgccgtggtctgtaactggctgataaccccttcaatcccctgtatcgctgacattttcatctcccggataatttctggtagcaaagcctaccagtaagtcaataagacaaaggcgctaaatagcaacaaaaaaacgggtttattggcggatagaaaaaaacgaaagcacaaataatgggagcgtcaatttttcgagtttgctgacccgggagtgagtcttgttccactttgccaataacgccgtccataatcagccacgaggtgcgcgatgaatgcgactgcagcccagacaaaatctcttgagtggcttaatcgcctgcgtgcgaatccgaaaattccattgattgttaccggttccgcggcagtggcggtcatggtcgcactgatcctgtgggcgaaaacccccgactaccgtacattattcagcaatctttccgatcaggatggtggcgcaattgtcagccaactgacgcaaatgaatattccttaccgcttcagcgaagccagcggcgctattgaggttccggcagataaagttcacgaactgcgcctgcgcctggcgcaacaaggtttgcccaaaggcggcgcggtcggtttcgaactgctcgatcaggaaaagtttggtatcagccagttcagcgaacaggtgaattatcagcgggcgctggaaggcgagctttctcgtaccatcgaaactataggcccggtaaaaggggcgcgcgtacatctggcaatgccgaaaccgtctttattcgtccgtgaacaaaaatccccttctgcatcggtgacggtaaatctgttacccggccgcgcactcgatgaagggcaaattagcgctattgtacatctggtttccagcgcggttgctggtctgccgccaggaaacgtcacgctggtggatcagggcgggcatctgttaacccagtccaataccagcgggcgcgatcttaatgacgctcagttgaaatatgccagcgatgtcgaaggccgtattcagcggcgtattgaagcgatcctgtcgcctattgttggtaacggtaatattcacgcccaggtcacggcgcaactggacttcgccagtaaagaacaaacggaagaacagtatcgccctaacggtgatgaatctcatgcggcgcttcgttcacgccagcttaatgagagcgagcaaagcggttccggttatccgggcggcgtaccgggggcgttgtcgaatcaaccggcacctgcgaataacgcaccaatcagcacgcctccggcaaatcaaaataaccgccagcagcaggcgagcaccaccagcaatagtgggccgcgtagcacacagcggaatgaaaccagtaactacgaagtcgatcgcaccattcgtcataccaaaatgaacgagggcgatgtgcaacgtctgtcagtcgcggttgtggtgaattacaaaaccttgccagacggtaaaccattgcctctcagcaacgaacagatgaagcaaattgaagctctgacccgcgaggcgatgggcttttctgaaaacgcggtgattcgctcaatgttgttaactcgccgttcaatagcagtgacgaaagcggcggagaactgccgttctggcaacagcaagcgtttatcgatcagttgctggctgccggtcgctggttgctggtactgctggtggcgtggctgctgtggcggaaagcggtacgcccgcagttaacacgtcgcgccgaggcgatgaaagctgtacagcaacaggcgcaggcccgtgaggaagtggaagatgcggtggaagtccgcctgagcaaagacgaacaactccaacaacgacgcgctaaccaacgtctgggggcagaagtcatgagccagcgtatccgtgaaatatctgataacgatccgcgcgtggtggcgctggtcattcgccagtggataaataacgatcatgagtaacctgacaggcaccgataaaagcgtcatcctgctgatgaccattggcgaagaccgggcggcagaggtgttcaagcacctctcccagcgcgaagtgcaaaccctgagcgctgcaatggcgaacgtcacgcagatctccaacaagcagctaaccgatgtgctggcggagtttgagcaagaagctgaacagtttgccgcactgaatatcaacgccaacgattatctgcgttcggtattggtcaaagctctgggtgaggaacgtgccgccagcctgctggaagatattctcgaaactcgcgataccgccagcggtattgaaacgctcaactttatggagccgcagagtgccgccgatctgattcgcgatgagcatccgcaaattatcgccaccattctggtgcatctgaagcgcgcccaggccgccgatattctggcgttgttcgatgaacgtctgcgccacgacgtgatgttgcgtatcgccacctttggcggcgtgcagccagccgcgctggcggaactgaccgaagtactgaatggcttgctcgacggtcagaatctcaagcgcagcaaaatgggcggcgtgagaacggcagccgaaattatcaacctgatgaaaactcagcaggaagaagccgttattaccgccgtgcgcgaattcgacggcgagctggcgcaaaaaattatcgacgagatgttcctgttcgaaaatctggtggatgtcgacgatcgcagcattcagcgtctgttgcaggaagtggattccgaatcgctgttgatcgcgctgaaaggggccgagcagccactgcgcgagaaattcctgcgcaatatgtcgcagcgtgccgccgatattctgcgcgacgatctcgccaaccgtggtccggtgcgtctgtcgcaggtggaaaacgaacagaaagcgattctgctgattgtgcgccgccttgccgaaactggcgagatggtaattggcagcggcgaggatacctatgtctgataatctgccgtggaaaacctggacgccggacgatctcgcgccaccacaggcagagtttgtgcccatggtcgagccggaagaaaccatcattgaagaggccgaacccagccttgagcagcaactggcgcaactgcaaatgcaggcccatgagcaaggttatcaggcggggattgccgaaggtcgccagcaaggtcatgagcagggctatcaggaaggactggcccgggggctggagcaaggtctggcagaggcgaagtctcaacaagcgccaattcatgcccggatgcagcaactggtcagcgaatttcaaactacccttgatgcgcttgatagtgtgattgcttcgcgcctgatgcagatggcgctggaggcggcacgtcaggtgatcggtcagacgccaacagtggataactcggcactgatcaaacagatccaacagttgttgcagcaagaaccgttattcagcggtaaaccacagctgcgcgtgcacccggatgatctgcaacgtgtggatgatatgctcggcgcaaccttaagtttgcatggctggcgcttgcggggcgatcccacactccatcctggcggctgtaaagtctccgccgatgaaggcgatctcgacgccagtgtcgccactcgctggcaagaactctgccgtctggcagcaccaggagtggtgtaatgaccacgcgcctgactcgctggctaaccacgctggataactttgaagccaaaatggcgcagttgcctgcggtacgtcgctatgggcgattaacccgcgctaccgggctggtgctggaagccaccggattacaattgccgctcggcgcaacctgtgtcattgaacgccagaacggcagcgaaacgcacgaagtagaaagcgaagtcgttggctttaacggtcaacggctgtttttaatgccgctggaggaagtggaaggtgtcctgcccggcgcgcgggtttatgccaaaaacatttcggctgaaggactgcaaagcggcaagcagttgccgctcggtccggcgttattaggtcgcgttctggacggcagcggtaagccgctcgatggcctgccctcccccgatacgacggaaaccggtgcgctgattaccccgccatttaacccgttgcaacgtacaccgattgaacatgtgctggacaccggcgtgcgcccaatcaatgccctgcttaccgttgggcgcgggcagcgtatggggctgtttgccgggtccggcgttggtaaaagtgtgctgctggggatgatggcacgttacacccgcgccgatgtcattgtcgtgggtttgattggtgaacgtgggcgcgaagtaaaagattttattgagaatatcctcggtgccgaagggcgtgcacgctccgtggtgattgccgctccggcggatgtctctccgcttctgcgaatgcaaggtgccgcctatgccacgcgcattgccgaagattttcgcgatcgtggtcagcatgtgttgctgattatggactccctcacccgctacgcgatggcccagcgtgaaattgcgctggcgattggcgaaccacccgccaccaaaggttatcccccgtcggtgtttgccaaattaccggcactggtcgagcgtgccggaaatggcattagcggcggcggatcgattaccgcgttttataccgtgctcaccgagggcgatgaccagcaggaccccattgccgactccgcgcgggcaatcctcgacggtcacattgtgctgtctcgccgactggcggaagccgggcactatccggctatcgatattgaagcgtcgatcagccgcgcaatgacggcgttgatcagcgagcaacattacgcgcgagtgcgcaccttcaaacagctgttgtcgagttttcagcgtaaccgagatctggttagcgtcggcgcgtatgccaaaggcagcgatccgatgctcgataaagccatcgccctgtggccgcagctggagggctatttgcaacaaggcatttttgaacgcgcggactgggaagcgtctctccaggggctggagcgtattttcccgacagtgtcataacccaggagataacggcagatggcagaacatggtgcgctggcgaccctgaaagatctggcagaaaaagaggtagaggatgccgcgcgcctgctgggtgaaatgcgtcgcggatgtcagcaggcggaagaacagctcaaaatgctgatcgattatcagaatgaatatcgcaataacctcaatagcgatatgagtgccgggatgaccagcaaccgctggatcaactatcagcagtttatccagacgttggaaaaagccattactcagcatcgccagcaacttaatcagtggacgcagaaagttgacattgccctgaacagctggcgagaaaagaaacaacgtttgcaggcctggcagacactgcaggaacggcaatccacggcggcactgcttgcagaaaaccgcctcgatcagaaaaagatggatgagttcgcccagcgcgccgccatgaggaaacctgaatgattcgcttagcgcccttgattaccgccgacgttgacaccaccacattgcctggcggcaaagccagcgatgctgcacaagattttctcgcgttgttgagcgaagcattagcaggcgagacaactaccgacaaagcggccccccagttgctggtggcaacagataagcccacgacaaaaggcgagccgctggtcagcgagattcttgccgatgcgcaacaagcggatttactgatccctgtggatgaaacaccgcctgtcatcaacgacgaacaatccacatcaacaccattaaccaccgctcaaacgatgacgttggctgcggtggctggcaacaatacggcaaaagacgaaaaagcggatgatctgaatgaagacgtcaccgcaagcctgagcgccctttttgcgatgttgccgggttttgacaatacgcccaaagtgactgatgtgccgtcaaccgtgttaccggcagagaaaccaacgctcttcacaaaactgacttctgcgcaactcacaacagcacagcctgatgatgcccccggcacgccagctcagccattaacaccgctggtagcagaagcccagagtaaagcggaagtcatcagcacaccttcaccggtgaccgctgccgccagcccgctaatcactccacaccagacacagccactgcccaccgtcgccgcgcctgtgttgagtgcaccgctgggttctcacgaatggcaacaatcattaagccagcatatttcgctgttcacccgccaggggcaacaaagtgcagagttgcgtctgcacccgcaggatttaggtgaagtgcaaatctccctcaaagtggatgataaccaggcgcaaatccagatggtttcaccgcatcaacacgtacgcgccgccctggaagcagcgcttccggtactgcgaacgcagctggccgaaagtggcattcagttagggcaaagcaacatcagtggcgaaagctttagtggtcagcagcaggccgcttcccagcaacagcaaagccaacgcacagcaaaccatgaacctctggcgggggaagacgacgatacgcttccggttcccgtctctttacaagtacgtgtaacaggcaacagcggcgttgatattttcgcctaacgtcagaggtagcaccgtaatccgcgtcttttccccgctttgttgcgctcaagacgcaggataattagccgataagcagtagcgacacaggaagaccgcaacacatgactgattacgcgataagcaagaaaagcaagcgatcgctttggatcccgattctggtattcattaccctcgcggcctgtgccagcgcaggttacagctactggcattcgcatcaggttgccgctgacgacaaagcgcagcaacgcgtcgtgccctccccggtcttctatgcgctggatacctttacggtcaatctgggcgatgcagatcgcgtactttatatcggcataaccctgcgcctgaaagatgaagctacccgctcgcggctgagtgagtatttgccggaagtccgtagccgtttgctgttactgttttcgcgtcaggatgctgccgtactggcgacagaagaaggcaagaaaaacctgattgccgagattaaaaccacgctttccaccccgcttgttgccgggcaaccgaaacaggatgtcaccgacgtgctgtataccgcttttattctgcgataacgacatgggcgatagtattctttctcaagctgaaattgatgcgctgttgaatggtgacagcgaagtcaaagacgaaccgacagccagtgttagcggcgaaagtgacattcgtccgtacgatccgaatacccaacgacgggttgtgcgcgaacgtttgcaggcgctggaaatcattaatgagcgctttgcccgccattttcgtatggggctgttcaacctgctgcgtcgtagcccggatataaccgtcggggccatccgcattcagccgtaccatgaatttgcccgcaacctgccggtgccgaccaacctgaaccttatccatctgaaaccgctgcgcggcacagggctggtggtgttttcaccgagtctggtgtttatcgccgtggataacctgtttggcggcgatggacgcttcccgaccaaagtggaaggtcgcgagtttacccataccgaacagcgcgtcatcaaccgcatgttaaagctggcgcttgaaggctatagcgacgcctggaaggcgattaatccgctggaagttgagtacgtgcgttcggaaatgcaggtgaaatttaccaatatcaccacctcgccgaacgacattgtggttaacacgccgttccatgtggagattggcaacctgaccggcgaatttaatatctgcctgccattcagcatgatcgagccgctacgggaattgttggttaacccgccgctggaaaactcgcgtaatgaagatcagaactggcgcgataacctggtgcgccaggtgcagcattcacagctggagttggtcgccaactttgccgatatctcgctacgcctgtcgcagattttaaaactgaaacccggcgacgtcctgccgatagaaaaacccgaccgcatcatcgcccatgttgacggcgtcccggtgctgaccagtcagtacggcactctcaacggtcagtatgcgttacggatagaacatttgattaacccgattttaaattctctgaacgaggaacagcccaaatgagtgacatgaataatccggccgatgacaacaacggcgcaatggacgatctgtgggctgaagcgttgagcgaacaaaaatcaaccagtagcaaaagcgctgccgacgcggtgttccagcaatttggcggtggtgatgtcagcggaacgttgcaggatatcgacctgattatggatattccggtcaagctgaccgtcgaactgggccgtacgcggatgaccatcaaagagctgttgcgtctgacgcaagggtccgtcgtggcgctggacggtctggcgggcgaaccactggatattctgatcaacggttatttaatcgcccagggcgaagtggtggtcgttgccgataaatatggcgtgcggatcaccgatatcattactccgtctgagcgaatgcgtcgcctgagccgttagtgatgaataaccacgctactgtgcaatcttccgcgccggtttctgctgcgccactgctgcaggtgagcggcgcactcatcaccattattgccctgatcctcgctgctgcctggctgataaaacggctgggatttgcccctaaacgcactggcgttaacggtctgaaaattagcgccagtgcttcgctgggcgcgcgtgaacgggttgtggtggtcgatgtggaagatgcacggctggtgctcggcgttaccgcagggcaaatcaatctgctgcataaacttcccccttcagcaccaacagaagagataccgcagaccgattttcagtcggtcatgaaaaatttgcttaagcgtagcgggagatcctgatgcgtcgtttattgtctgtcgcacctgtccttctctggctgattacgcccctcgccttcgcgcaactgccgggtatcaccagccagccgctgcctggcggtggacaaagctggtcgctcccggtgcagacgctggtgttcatcacctcgttgacgtttattccggcaattttactgatgatgaccagtttcacccgcatcatcattgtttttggtttattgcgtaacgcgctgggaacaccctccgcgccacctaaccaggtattgctggggctggcactgtttttgaccttttttattatgtcaccggtgatcgacaaaatttatgtcgatgcgtaccagccatttagcgaagagaaaatctcaatgcaggaggcgctggaaaaaggggcgcagccgctgcgtgagtttatgctgcgtcagacccgcgaggcggatttagggttgtttgccagactggcgaataccggcccgttgcagggacctgaagccgtgccgatgcgcattttgctcccggcctacgtgaccagcgagttgaaaaccgcatttcagataggcttcacgattttcattccttttttgattatcgacctggtgattgccagcgtgttgatggcattggggatgatgatggttcccccagccaccattgctctgccctttaaactgatgctgtttgtactggtggatggttggcaattgctggtcggttcgctggcgcagagcttttacagctagagaggcaaaatgacacctgaatcggtcatgatgatggggactgaagcgatgaaagtcgcgctggcactggctgccccgctgttgctggtggcgctggtcacgggtcttatcatcagtattttgcaggccgccacccagattaacgaaatgacgctgtcgtttattccgaaaatcatcgccgtatttatcgccattattattgccggaccgtggatgctcaatctgttgctggattacgtccgcaccttgttcactaacctgccgtatatcatcgggtaggccgtacaatgatgcaggtgacaagcgatcaatggctttcctggttaagcctgtacttctggccgttactgcgcgtgctggcgctcatttctaccgcaccaattctgagcgaacgcagcgtgccgaaacgggtaaaactggggctggcaatgatgatcacgttcgccattgccccatcattacctgccaacgatgttcctgttttttcgttctttgctctgtggctggccgtgcagcagatcctgatcggcattgcgcttggttttaccatgcaatttgcctttgccgctgtgcgaaccgctggcgaaattatcggtctgcaaatggggctgtcatttgcgacgtttgtcgatccggccagccatctcaatatgcccgttttagcgcgtatcatggatatgctggcgttactgctgttcctgacatttaacggtcatttatggttgatttcactgctggtcgatacctttcacaccctgcctattggtggcgaaccgttgaacagcaatgcgtttctggcactcaccaaagcagggagtttgattttccttaacgggctgatgctggcgttaccgctcattactctgctgctgaccctgaatctggcattaggtttactgaatcgtatggccccgcaattatccatttttgttattggatttccattaactctgactgtcggtatctctttaatggcggcattaatgccgttaattgcgcctttttgcgaacatttattcagtgaaatttttaatttgctggctgatattattagtgaattgccattaatataattccgtaacgtttatcatgttatcctaaggattatccgaaaaataatacctacgaacatcttccaagatactcctgcagcgaaatatttgttttaagctcactcacatatcgcaacatttactttactttaagacaattccaggcaaattatacaacactttacgggatagtaagtccgcctgaaaaatcgcgagagtggcgcattaggtgacccatgttgttccgtttagtcatgatgaaatattcaggtaaggggaattatcgttacgcattgagtgagggtatgccatgtcaacgattattatggatttatgtagttacacccgactaggtttaaccgggtatctgttgagtagaggggttaaaaaaagagaaatcaacgacattgaaaccgttgatgaccttgccatagcttgtgattcacagcgcccttcagtggtgtttattaatgaggactgtttcatccatgatgcttctaacagtcagcacatcaagcacatcattaatcaacatcccaatacgttatttatcgtttttatggcaattgccaatgttcattttgatgaatatctattggtcagaaaaaatttattgataagttctaaatcgattaaaccggaatctctcgacgatatccttggcgatattctgaaaaaagagacaacgataacctcgtttttaaatatgccgacgttatcattgagccgaaccgaatcgagtatgttgcgaatgtggatggcaggtcagggaaccattcaaatctctgaccaaatgaatatcaaagccaagaccgtttcatcgcataaaggtaatattaaacgtaagatcaaaacgcataataaacaggttatctaccatgtcgtccgactgacggataatgtgactaatggtatttttgtcaacatgcgctaacacattctgactggtggtttcccaccagtcaggctgaataagattactctgctttctccacaaagataccgtcctgatgccctgcttcattaaaaaccagatgccgagcgggtagtcttccagcgaaaccaggtacattgtgccttcactaaactcctcaactgccagtaccacgccaggacgacgcggaccgccatccgttttgactgttacccgatcattcaccttcatcgttttcctcctgtgcctttgtgccagtgtagaacaatttcgtttttctggcagcgccaggcgcgcgcgagtgctgattttctcgacggtctatacttaagtgatgccaggcggacttaacgactggcggcaacaacagagtaacagttgcgaggaaagatgatgaaaaccgcaaaagagtacagcgataccgcaaaacgtgaggtcagcgtcgatgtcgatgccctgctggcggcgatcaatgaaattagcgaaagcgaagttcatcgcagccagaacgattctgaacacgttagcgtcgatggacgtgaatatcatacatggcgtgaattggcggatgccttcgaactggatattcatgacttcagcgtctctgaagtgaatcgttgaatgcacaataaaaaatcccgaccctgagggggtcgggatgaaacttgcttaagcaagaagcacttaaaaaattcgttacaccaggaaatctgatgtgttcatcaccttatccgcaatttttttcgctgacaagaaaatattcgctatatgaatgattaacgctacttatgaatagaaatgtgacgcacgtcaccccttggtggctctggcgtcagcgggatcgctcccgaacaaaatcatctttgataatttgtgctgttttgagaatcatcctggtaaggggagtactgcgcgactatgttttcaattcaacaaccactactggtttttagcgatcttgatggcaccctgctggacagtcatagttatgactggcaaccggcagccccctggctcacccgtttacgcgaagcaaatgttcccgtcattctctgtagcagtaaaacatcagcggaaatgctgtacttgcaaaaaacgttggggctacaaggtttaccgctgattgccgaaaatggcgcagtgatccagcttgctgagcaatggcaggagatagacggttttccacgcatcatctcaggtattagccatggcgaaatcagccaggttttaaatacgctacgcgagaaagaacattttaaattcacgacttttgatgatgtcgacgatgcaactatcgccgaatggacgggattaagccgtagccaggcggcgctgacgcagcttcatgaggcgtcggtaacgctaatctggcgcgacagtgacgagcgtatggcacaatttaccgctcgtctgaacgaactgggcttacagtttatgcaaggtgcgcgcttctggcacgtcctggatgcctctgccggaaaagatcaggctgccaactggattatcgcgacctatcaacaattgtcaggcaaacgcccaaccacacttggcctgggcgatgggccaaacgatgcgcccttactggaggtaatggattacgcggtgattgtgaaagggctaaaccgtgaaggggtgcatctgcatgatgaggatccggcccgcgtctggcgaacgcagcgtgaaggaccggaaggatggcgtgaaggactggaccattttttctccgcccgttaagcgttatcgctcgcgaatacccgattacgcccagcctgtttagcgagataaagccgacggtcggccagtgactggaattgttcaaaatcataatcaccggtttcctcgctgctacttacccccaacgaggcactgatgcgtatcgtcgtactcttagcaatcaacatctctttttcatttaacttcaggcgaatacgttctgcgacttccgcagcctccgtcagactcgcgcctggcagaatcacacaaaactcctcaccaccgacccgcccggcaacgtcctgcgcacgcaaggaactgctaattaatccggcagcatgagaaagaacacggtcgcccgcctgatgaccaaagcggtcattaatcgctttaaaatggtcaagatcgacctgaatgacagaaaaaggatgttggtgcgtctgacacaatttagcgagcggacgggctttttcgaacagtgcgccacgattatataaacgggttaaggtgtcgtgccacgcctgccactgcaacgaactttgcagaacatacatgttgctgaccatccggcgaatcacataccaggagatgagtaacatggtggtaaagagcgcccacagcagggttaatgcaatgctgatactgccgaaatcgccgcgcacgccttcgcttaacgtatggacgcgcaccagcacaccgtcgaaatggtccagacgttcccagctaacatagcgactgtccatacgaatgccgccccgcgtgtcatgttccattgcctacgccagcaaggccagttcacgaggatcaaaaatattccctgttggatggtcaggattggaagaggtcaaaaatctcagcttactgtcatagagctgatactcaccatcgaggtttttatcgatggcgtttcttaaaaattgctgcatagtacgcacgggaatactcatccccagcacgccataccagtagttattactgtctaccggaacactgacggtaacctgcggttcagtattgctggcgtgttccggttgcgaagtgaaccagcgtaccgcgcggtgacgattttctcgttgtgaatggccaataaaccagggttgggtgacatagccgtaataacgcgttggaacattgcgcgtaaacaaggtcggctgcgtcgaaacgtaaaatccggcacgcgagacatacatcgcctgttcaaccatcgacgaggagttgtgcgctagtcgcagcaagtaaccaacttccagtgcagcggtaatttcattgtcgaggctttcattttcgcgagacaggagattcccctcgctgactaatgcatccgacacgccattgactggcagggtgcgccgtcggttgagttcgattttccaggcgtgctcgtcgcgatgctgttcgaactcggttacagcatcacgcagagaggtgaaatccagtggcgctatgagagcttcgcgcatgccattacgcaaaaagatcagtttgtcgacgttatactgcaaatgcttatcgagcgcgttggctacgttttccagatgattacgctggctggagatataggcatcttccagcaccactacttcacgccaggtgagcaaggtggaaaaaagcaataccactataaagcagagattaacgatatgaccaggccccaggcggcgtgcgagttttttcaaccagctctggttttccatttttgtctcgtgctgcaccctgacgactccccacctgcttttttatgattctggcataacctggcgatagcgtaccgcaaaacagcgataattttataatggtggcatgataagacgcgactatcattcattgcaggcattggcacaccaggccggatgtgatccggcctggtcttaatgataccctttcaaacttcttccgcagaacgactcccctcccctggaacaagctcggtttcatgaaaagcttcccgcttgaccccgtaaccgtcataccaacgacactcaaccataccgctggagtatccagtgacaatcatccgcgggccgccctctttaaccgtaacttcctcactaaccataaagctcatactcgcctccttttttcgagtgaaacttgttcaccttagttgaagatggcgaattttgcataatagcttgtgcgagtattaatgtgcctgaccgcgcatttttgctacggctttcactcccagcaccacgatgccgccgatgataaatccaagaatcagatttaaaacagtcggtaatatcatcgccaccactgcactttgctgcccggcgaaatgttcaatggcgtgatgcagcggcgcaataccatgtaccacaatcccgccgccgacgaggaacatcgccagcgtgccgacaatcgaaaacgctttcatcagccagggcgcgataatcaataatcctttacctaatgcctgcatcagcgcgctggatttttccgccagccaataccccaggtcatcaatcttaacgataacccctaccagaccgtagacgcccacggtcactaccagcgcgatgcctgaaagcaccagcacctgattaagcaacggcgcttcggccacaatccccagcgtgatggcgacgatttccgcagacaatataaaatcggtacgaatcgccccttttattttgtccttttcaaacttcagcggatcctgcgccgccagcttctccagacgctgctgactctgcgccggatcttctttatgtttacgcgcctccagcatatgcagcactttctctaccccttcaaagcagagaaacgcgccaccgatcatcaacaatggcgtaatcgcccacgggataaacgcactgataatcagcgccagtggcaccagaatcactttattgatcagcgatcctttcgccacgccccagaccacgggaagttcccggttggcccgcacacctgaaacttgttgcgcattgagcgataagtcatcccctaatacaccggcggttttcttcgccgccagtttgcccatcacggagatatcgtccagcagtgtggcgatatcatcgagcaacgtcagtaaactactcccggccaaaagcattccctctcattttattgttgaagggtgtaagtatgaagcaaaaacggcagctctgatacttgcttcacaggtcaacattttttaacaatcaagtgcaattatatctctcgccagcagaatgattttcacgtttactatgaaccacctttttatttccaccgtgagggattatgcgtttccgccagttattaccgctttttggcgcgctgtttgcgttgtatatcatttggggctcaacctattttgtcattcggattggcgtggaaagctggcctccattaatgatggcgggcgttcgattcctggcagccggtattttattgctggcatttttgctactgcgcggacacaagctccccccgctacgtccgctgctcaatgccgcgctgattggcctgttattgctggctgtcggtaatggcatggtgacggttgccgaacatcaaaatgttccttccggcatcgccgccgtagtggttgcaaccgtgcccctctttaccctgtgcttcagccgcctgtttggcattaaaacgcgcaaactggaatgggtgggtattgccattgggcttgccggaatcatcatgctcaatagcggtggaaatttaagcggcaatccgtggggcgcgattctgattttaatcggctcgattagctgggcgtttggctcagtttatggctcgcacattaccttacctgtagggatgatggcgggtgcgattgagatgctggcggcaggcgtggtgttaatgatcgcgtcgatgattgcgggtgaaaaactgacggcgctcccttccctttcaggcttccttgcggtcggctatctggcgctgtttggttcgattatcgccatcaacgcttatatgtatttaatccgcaacgtcagtccggctctcgccaccagctacgcctacgttaacccggtggtcgcggtcttgctgggtacgggactgggtggagagacgctttcgaagattgaatggctggcgctcggcgtaattgtcttcgcggtggtgctggtcacgttgggaaaatatctctttccggcaaaacccgtagttgcgccagttattcaggacgcatcaagcgagtaaatgaatcccctgcgtgtcgatctgcgcgctggcaccttcgccgcagatccactcttccagacgctcgctaagcgcttcatccgtcagcttctcgcgcccacgtaacgcgcactcccagacaatcaatacgcgccagccgagttcctgcaagcgactgatatcgcggcgatcgcgctcaacatttttacctatcttctccagccagaactcggttcgagtcgcaggcactttaaacagatagcagtgatgatgatgccagaagcagccatgggtaaatatcacgcagcgatattcatcaacgacaaaatccgggcgtccgggcagactggcgtcctgaacgcgaaacgccagtccctgcccggttaacaaactggcgaggcgcttctcaatcgccgtatcacgcgtggcaatcgcgcgcatatttttgctgcgtgtggccttatcgtgaacatcggccatgttgtgcctcttgctgacgcaacgccaccgcctgtttgatttttggctcaagcagttttgccaccgcggcaaagaccggcacgaccaccgagttaccgaactggcgataggcctgagtgtccgaaaccggaatgcggaatttcgcttctcccggcgcttcaaaacccattaagcgcgcgcattcccgaggcgttaaccgacgtggacgatgttgctgattcagcggatcgtcaaagtctttttcacccgtggccatatcccatccgcgatcgattaaaatttccgcgccatctttgtaataacgcgcagacagcgtacgggtgacgctttgcggattgttcggataaaccattccataaccgaagccgttaccgcgcgcctgatgttttttcgcatatcgatagaggtacttccacagtaccggcgtcaggatatatttcgcctcgaccatcgggtccagcagctgcgccagcgtcactcgctgcgcagggaaacatccgctgatatcacgcagagtaaaatcggctttcaggttaagatcgcgacgaaaacccaccagcacgatgcgttcacggtgctgcggcagaaaatgtttaccatcgatgattttcggatcgtccggcccgttatcttctgcatcagccacgtcatagcccagttcgtccagcgtctgcatgatgatgcggaacgttttaccctggtcgtggcttttcaggtttttgacgttttcgagcacaaacatcgccggacgacgcgcgtcgataatgcgcaccacatcaaagaacagcgtgccctgagtatcgcaggcaaaaccgtgcgcccgcccgagcgagttctttttcgatacgccagccagcgaaaatggctgacaagggaaaccggccagtaaaacatcgtgttcaggaatgtgttgacgaatatgttccgccgccgcctcatcactcacgccttctttatggctgagggtgatgtcgcggatatcttcattaaaatgatgcgtcgccgggtcgcaataatgattggctttataagtgcgtaccgcatgtttgttccattcgctggtaaacacgcactgtccgccaatcgattcaaaaccgcgacggatgccgccaattccggcaaatagatcgataaagcgaaacgcataatgcggatgatgtgccggtggtttgggtaacaacgtttgcagatgggcgaactctttctcacttaaacggtgccatgccgagtcattcgccagcgcacgttttaaaattgccgcgctccagtgattctcacccacaccattaagctgagccaccagcgttttaacatcataaatttgcagcagtttctccagcattgcctgtgcggcattcccggtgctgtatgaatcggttactgatatattttcctgcatagatttaaccggccatctgagatggccgacaggttaacataattacagccatttagggccacgcgcttagcccgcgggtgaaaacgcatctatcaccttgtgatcgacaccttcattctcccccgccagttcggcactgagcttcgccataaactcgactaaaaattgcgcgttgtgctgcgccagctgcttgcctcttacggtttgcatggtttgcggtagcttcaacaacttagtctggaaatgatccagcgcgtagcgtttatcatcaagcgggcgatgctgtgcgagcggatcttcggcatcaaacagcgccacgcccaatgcccctgaaacggcaaacacgcgcgccaggccaatcgcccccagggcttccagccgatccgcatcctggacgattttagcttccgttgttaagggggcgatttgcgcgctgaaactgtgagcggcaatggcatgacaaacggcctcaattttctccgccggaaattgctcgaactcttcacagagcaggcgacgcgtctcttctgccgccaggattgaagaacgctgccgctgcggatgatttttcgccaggctcacaatatcgtgaaaataacaggcggttaaaatcaccagcatatcgacatcgtcatctgccgccagcttctgtgccgtagcccagacgcggcgaaaatgacacacgtcatgggccgcgtcctggtgctgatgatggtttttcaaccagttttcgaactgtgcctgccagtgttgtaagtccatacgcgctccgttgccaaagagtcgccaccttagcagtttttattcatagcgtctgctacgtgcgggacgaggtcgggtgtaccaggcaatgctgcctaacaatgccccgaccagagccataaataaaaatccgaccagtgcccctaaccactttcccgcggtagagcctaaatcgctttcaaatcccgacacgggggcatcggggatccggctcatcacccagatgtaacgcgccattgcccagacgaaatagccacaccgtgtatagaaagcccacaaagccagtttgccgccagggctgcgagagagtctctcttccatctttgtcgaaccgtattccattttgagataacccggaaaattcagacttagtactattatgtgataaaagtcacatttttccacattgaatgagccagtcaagactcaatcattttttgaacaaatagataaattttgcgcaacggcagtgaatacagtaaaaatcgttttgagcgattttatttatctttgatatcggctttattaattcatttaatcaatatattagcactgaatacaattatacctttttatttttctgtgtcatgatgcctccgttattagccttttatcgtcttgtttatattttttgggccggcatgatgccggctttttttatgccttcattaatgtgcgcgtgatcacaccaggtgtttggcgtaacaatcattgatactccctatctttccgctcaacttataacttattgatataaattcataattttcatgaatgcttatattcagaattcataattctgaattatattaaatatattagaancatttngnnnnctttnaannacatttgttacatgtaatccttaaaataaaatgaacttcatagaatagtatccaaatgtgctttttttggataacggcacttattgatatattcatgaagattataatcacaagggaatacataatgaaaagaaaagttctggcaatgctggtcccggcgttattagttgctggcgcagcaaatgcggctgaaatttataataaagatggcaataaagttgatttctacggcaagatggttggcgaacgcatctggtcaaatactgatgataataacagcgaaaacgaagatacctcctatgctcgtttcggtgttaaaggtgaaacccaaatcaccagcgaactgactggttttggtcagtttgaatacaacctcgacgccagcaagcccgaaggtgaaaaccaagaaaaaacccgtttaaccttcgccggtttgaaatataacgagttaggatcatttgactatgccgtaactacggtgttgcttatgatgccgcagcttataccgatatgttagttgaatggggtggcgattcctgggcttccgctgacaacttcatgaatggtcgtaccaacggtgttgcaaccttccgtaactatgatttctttggcctagttgatggtcttgattttgcgattcagtaccaaggcaaaaacagcaaccgtagcactaagaaacaaaatggtgacggctatgcgttgtctgtagactataacatcaatggttttggtatcgttggtgcatatagcaaatctgatcgcaccaacgatcaagttgccgatggaaacggttcaaatgctgaactgtggtcattggctgcaaagtatgacgcgaaaaatgtctacgcagctgtaatgtacggcgaaactcgtaatatgactccgggttctattgatacaggtgttgccgatcgagaaggcaatacaataatgcgtgatcaacttatcaatgaaacccagaactttgaagcggttgttcagtatcaattcgactttggtctgcgtccgtccttaggttatgtgtactctaaaggtaaagatatcaaaggggtacccggacatagatatgttgacgctgaccgtgtgaactacattgaagttggtacctggtactactttaataagaacatgaacgtttatactgcatacaaattcaacatgctggataaagatgaggtagcctgagtttaacggacactccttcctgaaatagaatggcatcagaaggagctaataatgagcagaaaaacccaacgttactctaaagagttcaaagccgaagctgtcagaacggttcttgaaaatcaactttcgatcagtgaaggcgcttcccgattatctcttcctgaaggcactttaggacaatgggttaccgccgccagaaaagggctcggtactcctggttcccgcacggtggctgaactggaatctgaaattctgcaactgcgtaaggcgttaaatgaagctcgccttgagcgagatatattaaaaaaagcaactgtagattcaatctgtcaatgcaacacccctttcaattatctctttcggtgttttgaacttcagtgtctttctcggtctgttgtttagctgagcagcaaccagatctagttcatgttgagtatattgggcaagacatgtctttttaggaaagtactgccgaattagcccatttgtgttctcatttgttccccgctgccaaggactctgaggatcgcagaagtaaactttaacgccggtgctgacagtaaattctagatgtctggccagttccattcctctgtcccatgtcagtgattttctgagttctgacggtaaactcaggaatttgtcggtaagagcctgatttactaagacagaatctttgcccctgagtctaaggatgatcgtataacgtgattttcggtctacaagtgtggctatatgagagtttttgtacctgagactaaatcgccctcccaatgccccagagagcgtctgttatcgatatttcgggaacgttcgtgaattggtgttccgttcactatgttaatcgtacctctttcgcctttgcgggtatgacgcctgccatggcgaaggctatgcgaccgtcgcagatgctgtatattcaggtggtgtagcgcttcacggctacgaaagtacagcgttttataaattgtctcaggtgatattcgcagcgttttttgacgtggttttgttcgccttaaccatcctgatatttgctctggagaccatttcatctccagcttttccagaacaagctttcgcaatggtaaattttgatccagtaagcacggttttggccttttcgccattctgttggctcggttattagcatcaacagctttgtaatagcgtctgccccgattacgctgaacttcacgtgagatcgtcgaaggactgcgattcagcgcagtagctatcgcacgaatgctcattttggctgacaaaccagctcgtatctcctcgcgctcagacagtgtcaggtgagctacagcccgcttacgctcatggggttttatgccgccagtatcccttaacatagtgaagatcgttccgggttttgaacccaggatattcgctatttcactgaagcctgttccgttcttccatagttcaaaaacagaggctttttcctctgctgtaaatgttcgtctcattcaaaaaacctccgcaaccccatgttttcacataactgttgcgttgaccaattgaatctacaacagcgtattttgcacaggagtcgctgaaaaatacgcgttaatcgaacaatggcgacaacaatttcccattgaagcgatgtgtcaggtatttggtgtatccaggagcggttattacaactgggtacagcatgaaccctcagacagaaaacaaagtgatgagcggctaaaactggagattaaggtggcacatatccgcactcgcgaaacatatggaacccggcggctccagacggagctggcagagaatggcatcatcgttggtcgtgaccgactggcacgtcttcgtaaggagctaaggctacgctgtaagcagaaacgcaagttcagagcgactacgaactcgaaccacaatctgccagttgcgccaaatctgctgaaccagacgttcgctcctacagcaccaaatcaggtctgggtggcggacctgacgtatgttgccacacaggagggatggttgtacctcgctggcatcaaagatgtttatacgtgcgaaattgtcggctacgccatgggagagcgcatgacaaaagagctgacaggtaaagccctgtttatggcgctcaggagccagcgcccacctgccgggctaatccaccactctgatcgaggttcacagtactgcgcatacgattaccgggtcatacaggagcagtttggtctgaaaacatcaatgtcgcgtaaaggtaactgttacgacaacgctccgatggaaagcttctggggaacgctgaaaaatgagagcctgagccactatcgttttaataaccgggatgaagccatctcagtaatacgggaatacattgagattttctacaatcgtcagcgtcgtcactctcgtctggggaatatctccccggcagccttcagggaaaaatatcatcagatggctgcttaaaaaaagaacaaatggtagtgtccgctattgccagtacacctcatatcgttacggcacattaccctgcccctcctggcacaataacatcaaccagcgactcttcaagccaacaccccaaatgcatttctttatgaattaatccgcaacaaacacacttcccatatagaaatatttgcaaaaaaagtgcatggaaaaagctttttctctaccaatccgggatataaatattcatcagcaccacaatattccacagcactaaatctctccccgccgccctgtacctctgataatggtctaaaatcattgaggccacttgcgacgacgttgctcaataaggaaaatttggcgtgaataatattcaacaccagtacagcatcatcattacatacttacacccgccgactaccgctttcgatatattgactcaattttccagcctggttaaaaatagcgaccagctcagtcgcaaatatagtgactaccctaactaggtaatgactccaacttattgatagtgttttatgttcagataatgcccgatgactttgtcatgcagctccaccgattttgagaacgacagcgacttccgtcccagccgtgccaggtgctgcctcagattcaggttatgccgctcaattcgctgcgtatatcgcttgctgattacgtgcagctttcccttcaggcggattcatacagcggccagccatccgtcatccatatcaccacgtcaaagggtgacagcaggctcataagacgccccagcgtcgccatcgtgcgttcaccgaatacgtgcgcaacaaccgtcttccggagcctgtcatacgcgtaaaacagccagcgctggcgcgatttagccccgacgtatccccactgttcgtccatttccgcgcagacgatgacgtcactgccggctgtatgcgcgaggttaccgactgcggcctgagttttttaaatggcggaaaatcgtgttgaggccaacgcccataatgcgggctgttgcccggcatccaacgccattcatggccatatcaatgattttctggtgcgtaccgggttgagaagcggtgtaagtgaactgcagttgccatgttttacggcagtgagagcagagatagcgctgatgtccggcggtgcttttgccgttacgcaccaccccgtcagtagctgaacaggagggacagctgatagaaacagaagccactggagcacctcaaaaacaccatcatacactaaatcagtaagttggcagcatcaccccctaactaagcaacaataaggaatacactatgactgttcaaacaagtaaaaatccgcaggtcgatattgctgaagataatgcattcttcccttcagaatattcgcttagccaatataccagtcctgtctctgatcttgatggcgtggactatccaaaaccttatcgcggtaaacataaaattctggtgatcgccgcggacgaacgttatttgccgaccgataacggaaaactgttctcgaccggtaaccatccgattgaaacgttgctgccgttgtatcatctccatgctgcaggtttcgaattcgaagtggcgaccatttccggtctgatgaccaagtttgaatactgggctatgccgcacaaagatgaaaaagtaatgccattctttgagcagcataaatcgttgttccgcaatccgaagaaactcgcggatgttgtcgccagcctcaacgctgatagcgaatatgcagcaatctttgttcctggtggtcatggcacacttattggtttacctgaaagccaggacgtagctgccgctttacagtgggcaatcaaaaatgaccgttttgttatctccctttgccacggcccggcggcttttctggcgcttcgccacggcgataacccactgaatggttattccatttgcgcattcccagacgccgcagacaaacaaacgccagagattggctatatgccgggtcatctcacctggtacttcggcgaagaactgaagaaaatgggcatgaacatcattaatgacgacatcaccgggcgagtacataaggaccgtaaacttctcaccggcgacagtccttttgcagcgaatgcgttgggtaaactggcggcgcaggaaatgctggcagcttacgcgggttaatccctgttacgtttgaatgtaagcgcataatcaatcgcagccgcgttagtactcacgacgtggctgcgtttttcacgggcgtactgaagccctatgttaatttctttgcggtaacgtaatccggaacacattatgcttattgagatagtgatacgtagcacttcccccatgtaattcggcaatcgctttgactaaagaaagaccaagtccctgacctacggaatgacgcgaattatctccccgccaaaatctacggaagagtttttcaggctcattaattttcgttccagggctggcgatatcaatattaagatagctgttggtatcaagaaaactggttatatgaatacgcgatttttctggcgaatatcgaatagcgttaacaataagattcgataacattcgttgcagtaaaattttatccgcaaagatttgctgattgcactcgacattaaagcaaatctctttctcgtctgaaagatattcaagatagtccaacaaattttcgacttccttattgagagaaagcgagtccagtttcaccaaaacattgtttttatctgccctggcaagaaacagtatgttctctgttaaccgcgaaatattttccagctcttcaatgtttccggcaattgttttttgatattcagcgatacttctggtttgactgagcgtaacctgattctgacccagtaatgcattaattggcgttctaagttcatgagcgagatcgtcagcaaactgacttagacgctcaaaatctttgactaaagcatgatgcattttattcaacgcctgcccaagaggttttagttctctcggtaatgcactaacctcaacaggctcccggctatcgttataattcagcgcttccgttacaccactcaactttttgatctctcgtaaccccgttcggattaacagcggacttaatactgagcacagtataatggcgacaatgcaaattataatgctattgattttatactgttcaagcatgttatgtctggctgaagccaatttagccacagtaaccgttaatgatggcgaaacttcatcaatattaattcgtaaagcatctatctctgtgtcattaataatgcttctgtaaatgccagctgcgctgattgtctcactagcaggtatgttatttaacatgccatcactgacatttgtccggttaacaattttattgatgctatcaccatgaatgatcaagatatcctgactaacatccatcatccggttaaagtacacaggtaacgtatctggatttaccccatcaattaacaactgcttgatctgtgctgtccggttaatgagtgttgtatcatcgcgccatttcaactcacttgccaggccattatagagagtccagacaattccagcgccagcaacagacagcagcaatataaaaagcaaggttaaacggacggttatagataatcttttcattatttttttaccgctacgaatgaatagcccatcccccggattgtggcgattagcttttcaggaaaaggatcatcaacttttgcgcggagcctgcgaatggcgacgtccaccgtattggtatcactatcaaagttgattccccaaatttcactcgcaataaccgttctggggataatctcgccagctctggaggccagtagccaaagtaactgaaactccttgcgcgtcagtgtaatactgatattgtccctgctcacactttgactaacagagtccattcttaagccactgatttctaatgttgaattcagagtgtgatgttgccttaattgtgcccgaacccttgccagcaactcagaaaatgaaaaaggttttaccagataatcatttgccccactgtccagccctctgactctgtcatcgacagaatctcttgcagtaaggcaaataaccggagtttgctttgctgttcttaacgtttgtaagatctgccagccatccatacccggaagcataatatccagaatgatcaatgcataatcatccttaagcgcaagataaagcccatctctgccatcagaaacggcatcaatgacataacccgcttcggaaagcccctgcgttacccactcctgggtcctttgattatcttcaataagtaaaatcttcatgaaaataatatgccataaatcatatgttatagaaacagcctggttcattacaaaattgtaatgctgctgtaaggttaccgtggacgctttttcgctatcctcaaaactcattcacatgacaaggatataaacatgttaaagcgttatttagtactctccgtagtaacggctgcattttcattaccttctttggtctatgctgcacaacaaaacattcttagtgtgcacattttgaaccagcaaacaggaaaacccgctgccgacgtgacagtcactcttgaaaagaaagcggacaacggctggttacaacttaataccgccaaaacagataaggatggacgaattaaggcactgtggcccgagcaaactgcaactacgggcgattaccgtgtcgtatttaaaaccggggactatttcaagaaacaaaatcttgaaagtttcttccctgagatccccgttgaatttcatattaataaagtgaacgagcattatcatgtgcctttattacttagccaatatgggtattcaacctatcgtggcagttaatgcataaatatgtaaaagcagatctctgctactgttagggaggacactccctgacagattaacagtaaacggctcttgctggctaacgacaaaaaagtgtgatggcttatgaaaaagaatcaatttttaaaagaatcagatgttacggccgagtcggtattctttatgacgcgtcggcaggtgttaaaagcactgggcatcagcgcggctgcactttctttgcctcacgctgcgcatgccgatctgcttagctggtttaaagggaatgatcgcccacccgcccccgccggaaaaccgttggagttcagcaagcctgccgcctggcaaaatgacctgccactgacgccagcagataaagtctccggttataacaacttctatgaattcgggctggataaagccgatcccgccgctaatgctggtagcctgaaaaccgatccatggacactgaaaatcagcggcgaagtggcaaaaccattgaccctcgatcacgatgatttaacccgtcgctttccgctggaagagcgtatttatcgtatgcgctgcgtggaagcatggtcgatggtggtgccgtggattggttttccgctgcacaaattgctggcgcttgccgaacccaccagcaatgcgaagtatgtcgctttcgaaacaatttatgcaccggaacaaatgccaggccagcaggaccgctttatcggtggcgggctgaaatatccttatgtcgaaggattgcgtctcgacgaagcaatgcatccgctcacactgatgaccgtgggtgtttatggcaaggcgttaccgccacaaaatggcgcgccggtgcgactgattgtgccgtggaaatatggctttaaagggattaaatcgatagtcagtattaagctgacccgcgagcgtccgccaaccacctggaatctggcagcgcctgacgaatacggtttttacgccaacgttaatccgcatgttgatcacccgcgctggtcacaggctaccgaacgatttattggttcaggcggcatcctcgatgtacagcgccagccaacgctactgtttaatggttacgccgagcaggtggcatcgctgtatcgtggcctggatttgcgggagaatttctaaatgcgtctgacagcaaaacaggtgacatggctgaaagtttgcctgcatcttgccggattgttgccgtttctctggctggtctgggcgattaatcacggtggattgggtgccgatccggtgaaagatattcagcattttactggtcgcactgcactgaaatttttgctggcgaccttgttaatcacacctctggcacgctacgcaaaacagccgttattgatacgcactcgccgcctgttaggcttatggtgctttgcctgggcgacactgcatttaaccagttacgcattgctggagctgggcgtgaataatctggcgttattaggtaaggagttaattacccggccttatttaacgttaggtattatcagctgggtaattttgcttgcgttagcgttcacttcaacccaggcgatgcagcgaaaactcggtaaacactggcaacagttgcataacttcgtctatcttgtcgcgatcctggccccaatacattatttgtggtcagtgaagattatttcaccgcagccactcatctacgctgggctggcggtactgcttttagccttacggtataagaagttgctttccctttttaaccgtttacgcaagcaggttcacaacaaattatctgtataacttcatattgccgacaaagtacgcgttatccctgccggatgcggcgcgagcgccctatccggcctacgcagatcacatcaagttatgtttcgtttgtcatcaacctcaaatcatcgacataatttattttatttcaataagatagataagcacacctgagagaactattctcttgtctcctaagagttgttgcattttgttatatgttacaatataacattacacatcatatacattaactctggaggaaactgttttggcgattcgtcttcataaactggctgttgctttaggtgtctttattgttagcgctcctgccttttcgcatggtcatcactcacacggcaaacccttaacagaggtcgaacaaaaagctgctaatggtgtttttgatgatgccaatgtacaaaaccgaacgctcagtgactgggatggagtctggcaatccgtttatcctttactgcaaagtggcaaacttgaccccgtctttcagaagaaagcggatgcagataaaaccaaaacatttgctgaaattaaagattattatcgcaaaggttatgtgacagacatcgagatgattggcattgaggacggcattgtcgaattccatagaaataatgaaacaacatcctgtaaatatgattacgatggatacaaaatactcacctataaatcaggcaagaaaggcgttcgttacttattcgaatgtaaagatcctgaaagcaaagcccctaaatatatacaatttagcgatcatataattgcaccacgaaaatcatctcattttcacatttttatgggtaatgattcccaacagtctttattgaatgaaatggaaaactggccaacgtattatccctatcagttgagtagcgaagaagtggtcgaggagatgatgtctcattgatttttttgcgctgacttcagttatttaacagaacagtgcctggtagtaacaacaataatttgccaagacaaataagtaagacaaactcagacacgctcatacttgagtcgtgtcttttttattatgtctgtagaaaaaaaatgcgaaaaaggcgaacaataaatacacaactcagccatacagactggcagcacaaatgtttccaggagcaagtcatctgtcatggtaaagctaaccagaaatataggttaattttggtgtttaaaccttttttacttgttagtatgatacaaaggctttcaaaaaagctgggaaattcaacaactcttggaaattatggactttgtcccgcggctttaatctgacggccgcgttccttttttgactcaattattgaccccttctctacgcaacttcagttcccgccagcaactttgcggcagtttcataggatcaatgtctaaaagaataatggtgaccgataagaaaacgactgaataactgtagattttcgctcgaaaccttcctgtcagctccatagcgaatcaagtgctgaatgtcacagtatcgaacagaaaacagtgacgatctaacccttcaagaatattctacgattgttctgtttaggaaaagcaaggcgggaagtcaggagataagtcattgataaagtggcggagagagggggatttgaacccccggtagagttgcccctactccggttttcgagaccggtccgttcagccgctccggcatctctccgttcagatggttgccatgatgtcaggaaatttggcattttaacagtccctgtccgtgcaattttgttcaagtgacgagtttgcgagcaaaacgatgattaagtggccctggaaagtacaagaatcagcacatcaaactgcccttccctggcaggaagcactatcgatcccccttttaacgggtctgacggaacaggaacaaagcaaattagtcactcttgccgaacgttttttacagcaaaagcggcttgttcctttacagggctttgaactggattcattaagaagctgccggatagcacttctattttgcctacccgttctggagttaggactggaatggctggatggttttcatgaagtcttaatttatcctgcgccatttgtggtcgatgatgaatgggaagacgatatcggtctggtgcataaccaacgtattgttcagtcaggtcagagctggcagcaagggcctatcgttttgaactggttggatatacaagattcttttgatgcatctggttttaacctgattattcatgaagtcgctcataagctggacacccgtaacggcgatcgcgccagcggagttccctttatttcgttgcgtgaggttgctggctgggaacacgatcttcatgctgcaatgaacaacattcaggaagaaatcgaattagttggtgagaatgcggcgagcattgatgcttatgctgccagtgatcctgctgaatgttttgccgtactttctgaatatttctttagcgccccagaactttttgctcctcgtttcccttcattgtggcaacgtttctgtcaattttatcaacaagatcctttgcagagactgcatcacgctaatgatacagactcgttttcggcgacgaatgttcattaattaacaactttgcagattaattaaccaattgaaatggcttatgaaatttagtgttgacagacaaggtaccgctaagtaatatgcgctccgttcacacgattcctctgtagttcagtcggtagaacggcggactgttaatccgtatgtcactggttcgagtccagtcagaggagccaattttctgttttcatgcatccttgcaaatctttatctgatgttgattcaacaggttagtgtgaaaactcttctcggtgcattttgattttaccctacgcatcgggaaaaattggtggtcaaatctggggtcaggttagttcgataatggagtgccccccatatgttccttaccgacgcaaaaatccgcaccctcaagccttctgataaaccatttaaagtctccgattctcacggtctgtatctgctggtcaagccgggtggctcccgccactggtatctcaaataccgtattagcggtaaagaatcccgcattgcgctgggtgcctatcaagccatctccctgtctgatgcgcgacagcaacgtgaaggtatccgtaaaatgctggcgctgaatatcaacccggtacagcagcgggctgctgaacgtggctcacgaacaccggagaaagtttttaaaaacttggcgctggcgtggcataaaagtaacaggaaatggtcgcagaacaccgccgaccgtctgcttgccagcctgaacaatcacatctttccggtcatcgggaacctacctgtatcagaacttaaaccccgtcatttcattgacctgctgaaagggatcgaggaaaaaggtctgctggaggttgcgtcccgcacacggcagcacctgagtaacataatgcgccatgcggtccatcaggagttaatcgatacgaaccctgcagcaaaccttggcggcgtgaccacacctcctgtcagacggcactatcctgccctgccgctggagcggctgcctgaactgcttgaacgtattggggcatatcatcagggccgtgaactgacccggcatgccgttctgctgatgctgcatgtgttcattcgctccagtgaactgcgtttcgcccgctggtcagagattgatttcacaaaccgagtctggacgatacccgcgacgcgagaacccattattggcgtgcgttattccggccgcggggcaaaaatgcgaatgccgcatatcgtccccctctcagaacagtccatcgccattctgaaacagattaaggatatcaccggtaataatgaactgatcttccccggcgaccataacccgtataagccaatgtgtgaaaacacggtcaataaggcactgcgggtgatgggttacgacacgaaaaaggatatctgcggtcacggcttccgggcaatggcatgcagtgcgctgatggaatcgggtttatgggcaaaggacgcagtagaacgccagatgagtcatcaggagcgcaataccgtgcgcatggcttatattcataaggcagagcacctagaagcccgcaaagcgatgatgcagtggtggtcggattatctggaagcatgccgagaatcttatgcaccgccttatacaattggtaaaaataagtttatcccatagtatactaacgaatccctcactctggcaaattaccaccacctccacaggaggtggttctatatagacttttatcaacttcatgacgaaaaacacctattttatcccaaaagaagacaatagagtcacagaggaatcaaagagcgactcaattgtctttggacagtctggttgtgaggttagaaaacagttactcctacaccattaaatagggcgcaatgctcgctaatttctcccgggtttctgtcagttcgcgttccggagtagattgcgcgatgattcccgcccccgcctgtatccagctgcgctggctatcctgaaatacggaacgcagaactagcgccgcatcaaagcgcgtatcgtccagcagcaggattgcgccggaataaagctctcgcggcgtcttctcaatttgcataatcgcgttcagagcagcatttttagggatacctgaggcggtaatcgacggaaacagcacggtaaacgcatcccaggcatccttgttttccgaaagctgaccgctcacgccagaccccagatgctgaacgctgccgcgctggcgaaccgacattaaatcttcaaccaccacgctgcccggctggcaaacagcctccagttcagcaatagcttctttgacagaaaggatatgctcaagcacctctttactgtcgtgcagcagttctgcctctttcgccttattatgctccgggtttcccatgcgatcgcgggtgcccgcaagcggttcagtgaccactttattgcccgtcactgacatcaccagttccgggctaaagcccagcgcttcgcgtccttcctgacggaacataaacgagcgcacaggcgtgtttgcctgccgcccgtataacagcgtggcgggcatatcaatccgcgatggcaggggaatggcgcgcgagacaatcactttgacatactcgccacggcggatctccgcaacggcgcgcgcaacctgttgtttatatgcctcaccattgagggcggtatccaccgccagtggtgcgttctgcgtcgttgtaccggcctcttttacccactcgcacaaacgtcggcacccgtcggcggagtccgcataaacggtgacatttcccttttcaaaaataagttcttcacggggaacggttaacgtcagcagcggccactccccggcgttaaaggcaatcccccgcgcatgcgccgcaaagttgaacccaacctgtccatatacccgacgtcctttcacctgaggatgcgccataaaacgacgcgcgcagtcggcaatggaatccaccgcccatttttgctccccggcatcatcaataaatgtcgcctgcgttccgtcggcattaatgtgcagccgtgcctggcaccctttgcctaaataccaacagggttgacgctcatagacataacactcttcttctgcgaactggcgtaaaacgccagaaatcgtcggtagccattgttcctctggtaacgccagatgtaaaaattcactgattttcatcccttacctctctgtgttattcccggatcaatcaattgcgcttgtcatcagttctcttgccgaatgcagccggatataagcaacccacgccgccagcaacgtgaatgccccggcaaacaggaagcaggccgcatagccaaaatgttgagcaacaacgccaccgataacgcctgccagaatggcgattgccgcatcagtacattgaaagagggtgaagtcgacaccggcctgcaaaggcgatgaaagcgacatcagcgtggcgtaaagacagaccagcgcgcaggccagcgaaatggactggacaaggaccagacactggagaatctgcagcagcagatgacccggcgccatcatgagagtcatcaccaccgccagcagcgcgatcccctggacgccataagccgtcaacagcgctctgccgggtgaggtgtatttcatcagcaatccgccggccagcgttcctgctatgcccgctgcaatattgccgccgctgaacagcgcgcccaatgcggacatgctcaacccatgatccaacaacagcggtgccagaagaggcagcacaaaccgcatgcctgaattcagcatcaataccagcagtaagcccaggcgagcctgcttcctccttagcgcataacctaacgccggaacatgcgggatagtcgctgttcgcgtcggctccgtaatgcgccacagcgggagtgacagcgccataatcagcaccgccatcatcagcatggcgacaggccagccggatgccgccgacagcatcaggaacaccccgccgccgcacatcattcccagatagctgccgccgacctgcacgctgtttccccagccgtaacccgtgcgggtcagttgatcgacacaaaagccgtcgctggcgatatcaatggtggaggcgaccgtgcctgccaccataaacagaacaaataacgcgacgatttgcgtatcggggaatcccccttctcgcccaaaccagccaatcgctgcgacaatagtcaggatcgccgctagcgcgacctgaccacgcaggattaacatgcgggaacggcgttcctggctaccgggcggaagccgccagcgctcgatccacgacgcccaaataaacttcagcgcccagggcagcataaacagggttgtcgcaccggcaagcgccagcgaaccgccagcagcgcgcaccagcgcgggtaaggactgcatagacagcgccgataccagactctgcgtcacatagacgccggcaatagcaaaaatcacccgcccggtcgtcaacgtcagcggtttcacattcgactgaacatcactcatgcacccactctccagacgcggaaaccccgtcgtcgcgccacacgcgcgcggccatttgcgcctgccacagcgcctgataacgtccatgatgtgagagcaattgcgcatgagtaccctgctcaaccacctgtccctcttccatcaccagaatgtttccggccccggcgatggtggataaacggtgagcgatgataatcaccgtccggttgtgaaccaggttatcgatcgctttttgcaccgccagctcgctttcaatatccagcgcggcagtcggttcatcgagaatgacgaccggcgcgtttttcaataacgctctggcaatggaaatccgctggcgctcgccgcccgatagctggccgcccatctctcccattggcgtcagccagccttgcggaagacgggaaataaactcaaggcactgcgccgcgcgggcggcctcttctacctcctgccgcgtcgcctgtgggcgcgcgatacggatattcgccagcagcgtgtcatcaaacagccagacatcctggaaaacaacagaaatcaggctattgagctgttccggcgtcaggcggcgaatatcgacgccgccaatagaaatctgcccttgctgcggatcggcatagcgcattaacagtttggtgaccgtagttttgcctgcgccggaggcacccaccagcgcgctcatactggctgccgggaacgtcaaagaaacatgattaagcgcgtagccgtcgccttcttcgtagcgatagctgacgttgtcaaagcggatatcgtaacgttccggcatctcgctttgctctgcgacgggaagcggtgctatcgccataaactgctcaatccgttgcagggcgctggcgatcagttccacaaccgaggtgtagctgataaacatcgccatcggttctgcgaagcgcataatcatcgcgacggcggcaatcaaaaaggcgaggttcagagtgcccgtcactacccagacgatcccggataacaccaccacctgtaggcccaactccacgacgctggcgatcagcatcgttgcgccagcgccctgacggtgagtgcgggtctgtaagttttccagcgcattgaaatgcgccagcagcgcccggcttttatcggcatcgctgccgcaggtgcgcaataccatcatcccctgagcaaattcaacgatatcgccgctcagacgctggtgcgcttcccccagcgtctgcatttgtcgccgcatcgccgggcggcgccagtaataaaacggcaccagcagagggaagatcagcaacatcaccagccccagccgccagtctatccacaatgtcgccagcgacgccgtcagcggcgtgacaatggtgagcagcaaaatattggctatcgcaataacataattgaggttttcatccacgctgcccagcagcaaggcgttcatttcacccgccctgccgcgctggagcttctccagcggcacgcggcgtaactgctcgccaagtcgcaggcgcaactcatgggtagcctgcgccagatgaccacggtattcaaagcccaggccataccagcgtagcaccagcgtcacaattgcggcgacgctgaaggccatagcccagttaagaagttgcggcgcgtctccccgtaacagcgcatcaatgatcggataaagacaggcaaaggcgatcccctgcatgaatgccgccagcaacagcgccagcatactgcgtcgcagcatcctggcctgactgccaacgctggagataagctggcgccagatgacgcgccaggccaggttatccgcaggattattgtctttcattttccaccacctcttcctgtgttccacccggcacccaatgctgcgcctgctgatagtgttgccagagccgttgatacaggccgccctgcgccaacagttgcgtatggttccccatttccctgagctgtccgtcggaaaacagcaatatcacatcggcctgagtcaccattgagagacgatgcgcgaccatgatgaccgtccggccacgcatggccgccgcgagcgccttgataagcgccgcttcgttttccgggtcagcaaacgccgtcgcctcatcgagcaccaggatggggcgatcctgcaaaagcgcccgggcgatagtaatgcgctgccgctggccgccggagagaaataccccacgttccccgactcgagtgttgtaaccttctggcagagcgctaataaaatcatgggcctgcgccactctggccgccgctataaccgcctccagcggcgtatccggcgcgcccagacgaatgttattggctatcgtgtcggcaaaaaggaagttgtcctgaaacacaaacgagagttgcttcatcagggtgtccgtctgcatatcacgcagatccacgccgccaatacggatatggcctttgtccgggtcggcgtaacgcagcagcaagcgcgccacggtgctttttccggcgccgcttggcccgaccagcgccacaatttgcccggcaggcacatgaaagctcacctcctgcaacgcggcgccagtacgcgcttgcggataatgaaagctcacctgctcaaaggtaatgctcgcctcttgcggctgctggtcagactgcggcagcgataactccggcatcgcgagaacctgataaatacgctgaatgcttaaacgcgtttgcgcgaccaggttattgagcatcatcattggcattacggcttcggccattccgctgcccagcagtaaaacggccacccacgcgataaaatcgaaactgccatagtgcaacaggccgtatcccgaccagatcaggacaaacagggtcgggagaggattcagaatcgagaaggaaaaacgcgctgaaaaaccggctttgcgataccaggttttgagcacatcgacccactcttcaagggcgcgttgatagcgcaaaaaactggtgctgccgctatcaaacgttctcaccacgggcatggcctgcacgaactcaataaccgccgcgctaacctgctcgcgcgccttatgataacgctgagccatattttccgaacgctggcgggcgagcacgagaataaccgatccaaacgccagtacccccagcgtcgcgattgccagccgccagtccagccagaacaagataacgattgtcgccagcggcatgatgatcgcgcgggcatagagcggcgtgctgtcggccacaaaaatatgtaacgacttcacgtcatccagcatcactttcgccactgacccgcagcccatttgctgtaacacgccaggcggaagctgcaatgctttacgggctaacctgctgcgcagaatgttctccagatgaaaagccgcgtaatgagaggtgttgaacgcctgtaagcgcagaacaaaagttaagaccacgcagccgatcacgccgcccagcggccaggccggaatagcgtcaggcgtcgcgcgaatgtcacgcaggctccacgccagaaaaaggagcgcccccaggctggttaatgccgccagccccgccagcgccatagctaaaataaccttcctgcgaaccggtgtaatcacctgccagagaggaaatcgggacagcgattcagtactggatgattgagatgacatgggagtaactgaatttcctgatgaatttttacggacgccaaaaacgacaattcagggtggcgttctgagaattaatgtgaataataaccattatcaataactcatctaccccattcggttctatttatacccgcattggtctaagccacagggagataaccaggtcatgacggagtcaccgcaaacgcaatctgaaatctctattcaccagttggtggtcgggaaacctgcaaacgatggcaatattcctgctcagtgtgaactgctgcgctgttcgttgcaggaaggtatggatattttgctctggaggggccattttgcgcggccagagacgttgcagctacacgacgatctgggcaggattaacttctcgtgcatcctggaaggcacatcgcgctttgcgattcagggactccggcgccacaccgactgggagcttgcgcgcaatcgccattacattacccatacgccagactgtcgcggcagcgcctcctattgtggccgattcgagagcattaccctctccttcagccctgaaaccctcgcgctgtgggtgccggatattagcgcggtcattaagaataagatcgactcccactgctgttgccagcagcagcgttgtaatgctgaaacccacttaacggctcaggccttgcgtcacgcgctgatgcgcatgcacggcggcttcagtcatgaacaaaagccgtcgacgctatggttgcaggggcaaagtctggtcatgctcagtctggtgctggatgaacatcgcgaagacgccagttgcctctcctgccacttcaacccgatggaacgccagaaactgctgcgggcgaaggatctgctgctggctgatctgacgcaagcgccgggcgtcgcggagctggccagagagtccggtctgagcgttctcaaaattaagcgaggcttccgcgttctgttcaacaacagcgtctatggcctgtttcaggctgaacgaatgcaggaagccagaagacgcctggccaacggcaatacctccgtcatgacggtggcggccgatctgggctatgccaacgccagccatttctctgccgccttccagaaacagtttggcgtaactccttcgacctttaaacgcgggatgtaaccggggtcgcgcccccctaaactcctccctgacagaggcccggataccccatccgggcctctgttctttccgcctgttaccaacccgaaacgggcataaataaacccgtttcgggtagcatccaattgttaataattattattctcatatgagtaatgcttttcggtaagacgtgccatcaggaggaagaatgatttctggcgcaccatttcaggattcgctgttaccggacaaccgccacgcggctgattaccaacaattacgcgagcggctcatacaggaactgaatttaacgccgcagcagttacatgaagagagcaacctgatccaggccggcctggattccataagattgatgagatggttacactggtttcgtaaaaatggctaccgccttacccttcgcgagctgtatgccgcccccacgctggcggcatggaaccagttaatgctcagccggtcgccggagaacgcggaagaagaaacgccgcccgacgaatcatcctggccgaacatgaccgaaagtacccccttcccattgacgccagtacagcacgcctacctgacgggccgcatgccggggcagacgcttggcggcgtgggttgccacctgtatcaggagtttgaaggccattgtctgacggcgtcgcagctggagcaggccatcacgaccttgctgcaacgccacccaatgctgcatatcgcctttcgccccgacgggcagcaggtctggctaccgcaaccttactggaacggcgtcaccgttcatgatttacgccataacgacgctgaaagccgccaggcctatctggacgcactgcgccagcgcctgagccaccgtcttttacgcgtggaaatcggcgaaacgtttgattttcagctgacgctcttgccggacaatcgccaccgcctccatgtcaatattgacctgctgattatggatgcctccagctttacgcttttcttcgatgagcttaacgccctgctggccggagaatcgctgccggctatcgacacccgctatgatttccgctcgtatttgctgcaccagcagaagatcaatcaaccactgagagacgtcgcgcgcgcttactggctggcgaaagcatcgacgcttccccccgcgcccgtcttgccgctggcctgcgaacccgccacgctacgtgaagtccgtaatacccgacgccgcatgattgtcccggcaacacgctggcacgcctttagcaaccgggccggcgagtatggcgtgacgccgacaatggcactggcgacctgtttttctgccgtgctggctcgctggggcggcctgacgcgtctgctgcttaacatcaccttattcgaccgccagccgctgcaaccggcggttggcgcgatgcttgccgacttcaccaatattcttctgctggataccgcctgcgatggcgataccgtcagcaacctggcgcgtaaaaaccagctcacgtttacggaggactgggagcatcgccactggtccggcgtcgaattactccgtgaactcaaacgccagcagcgctacccccacggcgccccggtggtatttaccagcaatctggggcgttccctctacagcagccgcgcagaatcgccgttgggcgagccggaatggggcatctcgcaaacgccgcaggtctggatagatcatctggcgttcgagcatcacggcgaggtctggctacaatgggacagcaacgacgcgctgttccctccggcgttagtcgaaacattgttcgacgcctactgccagttgattaaccaactctgcgatgacgaaagcgcctggcaaaagccgttcgcagatatgatgcccgccagccagcgcgcgatacgcgaacgggtcaacgccaccggcgcccccattcccgaaggcttgctgcatgaaggcattttccgtatcgctctgcaacagccgcaggcgctggcggtaacggacatgcgttatcagtggaattatcatgagctgacagactatgcccgccgttgcgcgggcaggttaatcgagtgcggggttcagcccggcgataatgtggctatcacgatgtcgaaaggcgcaggacaacttgttgcggttctggccgtcctgctggccggggcggtttacgttccggtttcgctggatcagcctgccgcacggcgcgagaaaatctacgctgacgccagcgtccggctggtgctcatttgtcagcacgacgccagcgccgggtcagacgatattcccgcccttgcctggcagcaggccattgaggcggagccgatcgccaacccggtagtacgcgcccccacgcaaccggcctacattatctacacctccggctctaccggtacgccgaaaggggtagtcatttctcaccggggagcgcttaacacctgttgcgatatcaatacccgctatcaggttggcccgcatgacagggtgctggccctctccgccctacattttgatttatcggtttacgacatttttggcgtactgcgcgcgggcggcgcgctggtgatggtgatggaaaatcaacggcgcgatcctcacgcatggtgtgagctgatccagcgccatcaggtcacgctctggaacagcgtcccggcgctgttcgatatgctgctgacctggtgtgaaggtttcgccgacgccacgccggaaaacctgcgcgcagtgatgctttccggcgactggatcgggcttgacctccccgcccgttatcgggccttccggccacaaggacaatttatcgcgatgggcggcgccaccgaggcgtctatctggtctaacgcctgcgaaattcacgacgtccccgcccactggcgctccatcccttacggttttccgctaaccaaccaacgctaccgggtggtggatgaacagggccgggactgccctgactgggtgccgggtgaattatggattggcggcattggggtcgcggaaggctatttcaacgatcccctgcgtagcgagcagcaatttttgacgctcccggacgagcgctggtatcgcaccggcgatctcggctgctactggccagatggcacaatcgagttcctcggtcgtcgcgacaagcaggtcaaagtcggaggatatcgcatcgagctgggcgaaatcgaaagcgcgctcagccagctggtgggggtgaaacaagcaaccgttctggcgatcggcgaaaaagaaaaaacgctggcggcatacgttgttcctcagggcgaggctttttgcgttaccgatcatcggaacccggcactgccgcaggcgtggcacacgcttgcgggaacgttgccctgttgcgccatctcgccagagatctccgcagaacaggtagccgatttccttcagcatcgcctgctaaaactgaagccgggtcacaccgctggcgccgatcctctccccctgatgaactcactcgctatccagccgcgctggcaggccgtggtggaacgctggttagcatttctggtgacacaacggcgactgaagcccgctgctgaaggttatcaggtctgcgctggtgaagaacgcgaggatgagcacccgcacttcagcggacatgatttaacgttatcgcaaattcttcgcggtgcccgtaacgaactgtcgttactgaacgacgcgcagtggtcgccggaaagcctggcctttaaccatccggccagtgccccgtatattcaggaactggcgacaatttgccaacagcttgcacagcgcttacagcgcccggtacgcctgcttgaggtgggaacccgcactggccgcaccgcagaatcgctgttagcacagctcaacgccggacagattgagtatgtcgggcttgagcagagccaggagatgctgctgagcgcccggcagaggctcgccccctggcctggcgcccgtctgtccctctggaatgcagacacgctggcggcgcacgctcactcggcggacattatctggcttaataacgccctgcatcgtctgctgccggaagatcccgggctccttgcgacattacaacagcttgccgttcccggcgcgctgctctacgtgatggagtttcgccagttaacgccgtccgccctactcagcacgctcctgttaaccaatgggcagccggaggccttgctgcataacagcgccgactgggcggcattatttagcgcggccggcttcaactgtcagcatggcgatgaggtcgcggggttacaacgcttcctcgtacaatgtcctgacaggcaggtgcgccgcgatccccgtcaacttcaggccgccctcgccgggcgtctgccggggtggatggtgccgcaacggatcgtcttcctcgacgccttaccgctgacagctaacgggaaaattgactaccaggcgctgaagcgtcgtcatacccctgaagcggaaaacccggccgaagcggatttaccccagggcgacattgaaaaacaggttgccgccctctggcagcaactcttatcaactggcaatgtcaccagagaaaccgacttcttccagcaaggcggcgatagcctgctggcgacccgtctgaccgggcaacttcatcaggcaggttatgaagcgcaattaagcgacctgtttaatcatccccggctggcggattttgccgccacgctgcggaaaaccgacgtcccggtcgaacaaccattcgtccactcccttgaagatcgctaccagccctttgcgcttaccgacgtgcagcaggcttacctggtggggcgtcagccgggctttgccctgggcggcgtcggctcacatttctttgttgaatttgaaattgccgatctggacctcacccggctggagacggtctggaaccgattaatcgcccgccacgatatgctgcgcgccatcgtgcgtgatggacagcaacaggtgctcgaacagacgcccccctgggtgatacccgcacacaccctccatacgcctgaagaggcgttgcgggtgcgcgaaaaactggcgcatcaggtactcaaccccgaagtgtggccggtattcgatctccaggtcggatacgtggacgggatgcctgcccgcctgtggctgtgtctggataacctgttgcttgacggtctgagcatgcagatcctgctggcggagctggagcacggctaccgctacccgcaacagctgcttccgccgctgcccgtcaccttcagggattatctgcaacaaccctcgctacagtcgcccaatccagattctctggcatggtggcaggcgcagcttgatgatattcctccggcgcctgcgttgccgctgcgctgcttgcctcaggaggttgaaacaccgcgcttcgcccgcctgaacggcgcactggacagcacgcgctggcatcggctgaaaaaacgggcggctgacgcccatctcaccccgtcggccgtactgttgtcggtgtggtcaacggttctctctgcatggagtgcgcagcctgacttcacgcttaaccttacgcttttcgacaggcgaccgctgcacccgcaaatcaaccagattctgggcgatttcacctcgctgatgctgctgagctggcatcccggcgaaagctggctgcacagcgcgcagtcactacagcagcggctgagccagaacctcaaccaccgcgatgtgtcagccatccgcgtgatgcgtcaactggcgcaacggcaaaacgtgccagccgttccgatgcccgtcgtctttaccagcgcgctgggctttgagcaggataacttcctcgcccggcgtaatctgctcaaaccggtctggggcatctcccagacgccgcaggtctggctcgatcaccagatttatgaatccgaaggcgaactgcgctttaactgggattttgtcgccgcgctgtttcctgccgggcaggtggagcgccagtttgaacagtattgcgcattgctaaaccgaatggccgaggatgaaagcggctggcaactgccgctcgccgcgctggtgcctcccgttaaacacgcagggcaatgcgcagagcgctcaccgcsygtrtgccytgagcagtctcagccacacattgcggcggacgagagcaccgtcagcctgatttgcgacgccttccgcgaggtggttggcgagtctgtcacgcccgcagaaaacttctttgaggcgggcgcaacgtcgctgaatctggtgcaactgcacgttttgttacaacgtcacgaattttccaccctgacgttgcttgacctcttcacccacccttctcctgctgccctggccgattatctggccggcgtcgccacggtggagaaaacacaacgacctcgccctgttcgccgtcgtcagcggcggatatagcgcgaagcaaactgatttttcccggaacgccatcgcgaacgcatggcgttccattgactttgtgaatcttaggaaacgggaccgattatggataacttgcgcttctcttctgcgccgacagcagattccattgatgcatcgatcgctcaacactacccggactgcgaacctgtcgcggttatcggctacgcctgccattttcctgaatcgccggatggcgaaacgttctggcaaaatctgctggaaggtcgtgaatgcagccgacgctttacgcgcgaagagcttctggccgtcggtctggatgccgccatcattgacgatcctcattatgtcaatatcggtacggtgttagacaacgccgactgcttcgacgccaccctgtttggctattcgcgacaggaagcggagtcgatggacccgcagcagcgcctgtttttgcaggcggtctggcatgcgctggaacatgccggttatgcccccggcgccgtcccccataagaccggcgttttcgcctcttcccggatgagtacctaccccggtcgcgaagcattgaacgtgacagaagtcgcgcaggtaaaaggtctgcaatctctgatgggcaatgataaagactatattgccacccgcgccgcgtacaaactcaacctgcacggcccggcgttatcggtacagaccgcctgctccagctcgctggttgccgtgcatctggcctgtgaaagcctgcgcgctggcgaatccgatatggcggttgccggcggcgtggcgctctctttcccccagcaggcaggctaccgctaccagcccggaatgattttctctcctgatggtcactgtcgtccctttgacgcctcggctgagggcacctgggccggtaacggtctcggctgcgtggtgctgcgtcgcctgagagacgcgctgctgtcaggcgatccgattatctcggtgatcctctccagcgcggtcaacaacgacggcaacagaaaggtcggctataccgccccttccgtcgcagggcaacaggcagtcatcgaagaggcgttaatgctggcggccatcgacgacaggcaggtaggttacattgaaacccacggcaccggcacaccgctgggcgacgcgattgaaattgaagcgttacgcaacgtctatgcgcctcgcccgcaggatcagcgctgtgcgctcggttccgtgaaaagtaacataggccatctggataccgcggcgggcattgccggactgctgaaaaccgttctggcagtcagtcgcgggcaaattcctcccttactgaattttcacacccccaacccggcgctgaaacttgaagagagcccctttaccataccggtgtcggcacaggcatggcaggacgaaatgcgctatgcgggcgtctcctcctttggtattggcggcaccaactgccatatgatcgtcgcctcgctgcccgacgcgctcaacgcgcgcctccccaatacggatagcggcagaaaaagtaccgcgctgctgctcagcgccgccagcgacagcgcgttgcggcggctggcgacggattatgccggggcgctgagagagaatgcggatgccagctctctggccttcacagccctgcacgcgcgccgtctcgatctccccttccgcctggcggcgccattaaaccgtgaaaccgccgaggcgctcagcgcctgggctagtgagaaatcgggggcgctggtttacagcggccacggcgccagcggcaagcaggtgtggctgtttaccggccagggctcgcactggcgcactatgggtcaaacgatgtaccagcactcaacggcgtttgccgacacgctggatcgctgtttttccgcctgtagcgaaatgctcacgccgtcactgcgcgaagcgatgtttaaccccgattcggcgcagctggacaatatggcctgggcgcagccggcgattgtcgcgtttgaaatcgcgatggcggcgcactggcgtgctgaaggactgaagccagacttcgccattgggcattccgtcggtgaatttgccgctgccgttgtctgcggacactatacgattgaacaggtcatgccactggtttgtcggcgcggcgcgctaatgcagcagtgcgcaagcggcgcgatggtggcggtatttgcagacgaagacacgctgatgccgctggctcgccagtttgagctggatctcgccgccaacaacggtacgcaacatacggtattttccgggccggaagcccgtctcgcggtattttgcgccacgctctcgcagcatgacattaactatcgtcgcctgagcgtaaccggtgcggcgcactccgctttactggagccgatactcgatcggttccaggacgcctgcgcgggactgcacgcggagccggggcaaataccgattatttccacgctcaccgccgacgtcattgatgagtcaacgctcaaccaggcggattactggcgccgacacatgcgccagccggtgcgttttatccagagtattcaggtggcgcatcagctcggcacccgcgtttttctggagatggggcccgatgcccagttggttgcttgcgggcagcgcgaataccgcgataacgcatactggatagccagcgcccggcgtaacaaagaggcgagcgatgtcctcaatcaggccctgctccagctttacgctgccggcgtcgccctaccgtgggccgacctgctggcgggcgatggacaacgtatcgctgcgccatgttatccgtttgatactgaacgttactggaaagagcgcgtctccccggcctgcgagcctgccgacgcagcgctgtctgccgggctggaggtggcgagtcgcgccgcgacagcgctcgatctccctcgcctggaagcgcttaaacagtgcgccacgcgactgcacgccatctacgtcgatcaactggtacaacgctgtaccggcgatgccatagagaacggcgtggacgccatgaccatcatgcgccgtggacgtctgctgccccgctaccagcagctactccagcgcctgctgaataactgcgtggtcgacggcgattaccgctgcaccgacgggcgatacgtccgcgcccgccccattgaacatcaacagcgggaatcactgctgacggaacttgccggttattgtgaaggttttcaggctattcccgacaccatcgcccgtgccggcgatcggttatatgaaatgatgagcggcgcggaagaaccggtggcgattatcttcccgcaaagcgcctccgacggcgtggaagtgctgtatcaggaattcagctttggccgctatttcaaccaaatcgccgccggggtattacgcggcattgtccagacgcgtcagccccgccagccgttgcgtattcttgaagttggcggcggaaccggcggcaccaccgcgtggctgctgccggaactcaacggcgttccggcactggagtaccatttcaccgatatctcggcgctgttcacccgtcgcgcccagcagaaattcgccgactatgatttgtgaagtatagcgagctggatctctgaaaacstkgcgcagtctcagggtttccaggcacagtcttacgatcttatcgtggcagcgaacgtgattcacgccacccgccatattggccgcacgctcgataatctgcgccccctgctcaagccgggcgggcgcctgctgatgcgcgaaatcacccagccaatgcgtctgtttgacttcgttttcggcccgctggttcttccgctacaggatctcgacgcccgcgaaggtgagttattcctcaccaccgctcagtggcaacaacagtgccgccacgccggattcagcaaagtggcgtggctaccgcaggatggcagcccgaccgccgggatgagcgaacatatcattctcgccacgctgcccggtcaggcggttagcgccgtaacattcaccgcgccatcagaacccgtgttggggcaggcgctgacggataacggtgattatctcgccgactggtctgattgcgcaggtcagcccgaacagtttaacgcccgctggcaggaggcctggcgtctgctttcacagcgtcatggcgacgctctgcctgtggaaccgccccccgtcgccgccccggagtggctggggaaggttcgcttaagctggcaaaacaaagccttttcccgcggtcagatgcgcgttgaagcccgtcatcctgctggcgagtggctgccgctatcgcccgccgcgcctcttcctgcgccgcaaacgcattatcaatggcgctggacgcccctcaacgtcgccagcattgaccatccgcttacctttagcttcagcgccggtacgcttgcgcgcagcgacgagctggcgcaatacggcatcattcacgatccgcacgcctcttcacgactgatgattgttgaggagagcgaggatacgctggccttagcggagaaagtgatagcagcgctcaccgccagcgcagccggattgattgtggttactcgccgcgcgtggcgagtcgaggaaaatgaagcactctctgcatcccatcacgcgctatgggccttgcttcgcgtcgcggccaacgaacagccggaacggttgcttgccgccatcgatctcgccgaaaacaccccgtgggaaacgctgcatcaagggttgagcgcagtctcactatcacagcgctggctcgccgcacggggtgacaccctttggctcccttcactgtcgcccaatacgggatgcgccgctgaattaccggcaaacgtgtttaccggcgatagccgctggcatctggtgaccggagcgtttggcggattaggccgccttgccgtgaactggctcagagaaaaaggggcgcgacgcatcgccctgctggcgccgcgcgtggatgagtcatggctacgcgacgtggagggcgggcagacgcgcgtctgccgttgtgatgtgggcgatgccgggcaactggccacggttcttgacgatctggcggccaacggcggcattgccggagcgattcatgccgctggcgtattggctgacgcgcccttgcaggagcttgatgaccaccagctggctgccgttttcgcggtaaaagcgcaggcggcaagccagctgttgcaaaccctgcgcaaccacgacggacgctatcttattctctactcttccgctgccgccaccctcggcgcgccgggtcagagcgcccatgcgctggcctgcggctacctggacgggctggcccagcagttttccacccttgatgcgccgaaaacgctctctgtcgcctggggcgcatggggagaaagcggtcgggcggccacgccggaaatgctggcgacgctcgccagccgaggtatgggcgcgttaagcgatgccgaaggctgctggcacctggaacaggcggtgatgcgcggcgccccgtggcgactggcgatgcgcgtttttaccgacaaaatgcccccgttacaacaggctctgtttaacatcagcgccacagaaaaagccgcaacgccggtcattcctcctgctgatgacaacgcctttaacggcagcctgagcgatgaaacagcggtgatggcatggctgaaaaagcggattgcggttcagctaaggctgagcgatccggcgtcactgcatccaaaccaggatctgttgcaactcggcatggactcgctgctcttccttgaactcagtagcgatattcagcactacctgggcgtacgcatcaatgcggaacgggcgtggcaggatctgtctcctcatggactcacgcagcttatctgttctaagccagaggcgacgcctgccgcttcgcagccggaagtgttgcggcacgacgccgacgagcgttatgcgcccttccctttgacgcccattcagcacgcctactggctggggcgaacccacctcattggctatggcggcgtcgcctgtcacgtcctgtttgagtgggataaacgccacgatgagttcgatctcgccatactggagaaagcatggaaccagctcatcgcacgccacgatatgttgcgtatggtggttgatgccgacgggcagcagcgaatcctggcgacaacgccggagtatcacatcccgcgtgacgatctgcgcgcgctttccccggaagaacagcgcatcgcgctggaaaaacggcggcatgaactgagctatcgcgttttgcctgccgaccagtggcctctttttgagctggtggtcagcgaaatcgacgattgccattaccgtctgcatatgaacctcgaccttttgcagtttgatgtgcagagttttaaagtcatgatggacgacctggcgcaggtctggcgcggtgaaacgctggcgccgctcgctattaccttccgtgattatgtgatggctgaacaggcgcgccgacagacatcggcatggcacgatgcctgggattactggcaggaaaaactgccgcaactgcccttagcgccagagctgccggtggttgagacgccccggaaacgccacacttcaccaccttcaaatcgacgatcggcaagacagaatggcaggccgtgaaacagcgctggcagcagcaaggcgtcacaccgtctgccgcgctgctcacgctgtttgccgctacccttgagcgctggagccgtaccacaacatttacgctgaacctgacgttcttcaatcgccagccgatccatccgcaaatcaaccagttgattggtgattttacctccgtcacgctggttgattttaacttctcagcgccggtgacgttgcaagagcagatgcaacagacccaacagcgcctctggcaaaacatggcgcacagtgaaatgaacggtgttgaggtgatccgtgagctgggccgcctgcgcggatcacaacgtcaaccgctgatgccggtagtgtttaccagtatgctggggatgacgctggaaggcatgactatcgatcaggcgatgagccatctgttcggcgaaccctgctatgtattcacgcaaacgccgcaggtctggctggatcatcaggtcatggagagcaacggcgagttgatgtttagctggtactgcatggacaacgtgctggaacccggcgctgccgaggcgatgtttaatgactattgcgccatcctgcaagccgtcatcgccgcccctgaaagcctgaagactctcgccagcggcatcgccaggcacattccccgccgacgctggccgctgaacgcgcaggcggactacgacctgcgggatattgagcaggcgacgctcgaataccccggcatccggcaggccagagcggaaataaccgaacagggcgcgttgacgctggatatcgtgatggccgacgatccttcgccatcagcggcgatgcctgatgagcacgaacttacccaactggcgctgccgttgcctgagcaggcgcagcttgatgagctggaggcgacctggcgctggctggaggcgcgtgcgctacaggggatcgcggctacgctaaatcgtcacggcctgtttaccacgccggagatcgcccatcgctttagcgcaatagtacaggcgctgtccgcgcaagcgtctcaccagtgtctgctgcgccagtggctacagtgtctgacggaaagagagtggttaatcctcgaaggtgaaagctggcgctgccgcattccgctcagcgagattcctgagcctcaggaagcgtgcccgcaaagccaatggagccaggcgctggcgcagtatctggaaacctgcatcgcccggcacgacgccctcttctccgggcagtgttctccgctggaattgctgttcaacgagcagcatcgcgttaccgacgcgctgtatcgcgacaaccccgccagcgcctgtctgaatcgctataccgcgcagattgccgccttgtgcagcgcagaacggattctggaggttggcgccggaaccgcagccactaccgcgccggtgctgaaggccacgcggaacacgcgacagtcgtaccacttcacggacgtctccgcgcagttcctcaatgacgccagagcccgtttccatgatgaatcgcaggtgtcttatgccttgttcgacatcaaccagccgctggatttcaccgcccacccggaggcgggttacgacctgatcgttgccgtcaatgtgctccacgacgccagccatgtcgtccagacgttgcgcagattaaaactgttgctgaaagccggcggacgtttgctgatcgttgaagcgacggagcgaaacagcgtattccagctggcgagcgtgggctttattgagggattaagcggataccgcgatttccgccgccgggatgagaaaccgatgctcacccgctccgcatggcaggaggttctcgttcaggccgggtttgcaaacgagctggcgtggcccgcgcaggaatcgtcgccgctgcgccagcatctgctggtagcgcgttcgcctggcgtaaatcgcccggataaaaagccgtgagccgctatttacagcagcgctttggcaccggtctgcccattttacagatccggcaaagagaagcgttatttacgccgctgcatgccccgtctgatgcgccgactgagccagccaaacccacgccagttgccggggggaatccggcgctggaaaaacaggtggctgaactctggcaatcgctgctgtctcgccccgtggcaaggcatcacgactttttcgaactgggcggcgacagcctgatggcgacaaggatggtcgcgcagctaaaccggagagggattgccagggctaaccttcaggatctgttcagccattcgacgctgagcgacttctgcgcccatctacaggcggctacgtcaggagaggacaacccgatacccctttgccagggcgacggtgaggaaaccctgtttgtcttccacgcttcagacggcgatatcagcgcctggctgccgctcgctagcgcgttgaacaggcgcgttttcggcctgcaagcaaaatcgccgcagcgctttgccacgctcgaccagatgatcgatgagtatgtcgggtgcatccgtcgtcagcagcctcacggcccttatgtgctggcgggttggtcgtatggcgcgtttcttgcggcgggcgccgcacagcgcctgtacgccaaaggcaagcaggttcggatggtgttaatcgatcccgtgtgccgacaggatttctgttgcgcaaaccgggcggccctgctgcgcctgttagccgaaggacaaacgcctctggcactgcccgaacatttcgaccagcagacgcccgacagccagcttgccgactttatcagcctcgctaaaacggccggtatggtgtcgcaaaacctgacgctgcaagcggcagaaacgtggctcgacaacatcgcgcatctgctgcgtttactgactgagcatacgccgggcgaaagcgttccggtcccctgtctcatggtgtatgccgccgggagacccgcgcactggacgccagcagaaaccgagtggcagggctggataaacaacgccgacgacgctgtgattgaagccagccactggcaaatcatgatggaagccccccacgttcaggcttgtgcgcaacacattacgcgctggctttgcgcaacctcaacgcaaccggagaacacgttatgatgccgtccgcctccccaaaacaacgcgtactgattgtgggcgccaaatttggcgaaatgtacctgaatgcctttatgcagcccccggaggggctggaactggtcggcctgctggcgcagggaagcgcccgttcaagagagctggctcatgcgtttggcattccgctgtatacctcgccggaacagataaccaggatgccggatatcgcctgtattgtcgtgcgttcgaccgtcgccggaggaaccggtacgcagcttgccagacactttctgacgcgcggcgtacacgtcattcaggagcatcccctccacccggatgacatcagttccttacaaacgctggcgcaggaacagggctgctgctattgggtaaacacgttttatccgcatacgcgcgcgggacgcacatggcttcgcgatgcgcagcagctgcgtcgctgtctggctaagacgccgcaggtggtccacgccaccaccagccgacagttgctctactccactctggatttgttgttgctggctctgggcgttgatgccgccgccgtggagtgcgacgtggttggcagctttagcgattttcactgtctgagactcttctggccggagggagaagcctgcctgctgcttcagcgctatctcgatcctgacgatccagatatgcatagccttatcatgcaccgcctgctgctgggctggccggaaggtcatctttcgctggaggcgagctacggccccgtcatctggtcatccagcctgtttgtcgcagaccatcaggagaacgcccacagcctctaccgcagaccggagatcctgcgcgatctgccgggtctgacgcgcagcgcggcgcccctgagctggcgcgactgctgcgaaaccgtcgggccggagggcgtcagctggttgctacaccagttgcgcagccatctggcgggcgaacatccaccagcggcctgccaaagcgtacatcagatcgcgttatcacgtttatggcagcagattttacgtaagaccggcaatgcggagatcagacgcctgacgccgccgcaccacgaccggttagccggtttctacaacgatgatgataaggaggcgctgtgacgcaatctgcaatgtgcataccgctgtggcccgcccggaacggcaatactgcgcatctggtcatgtgccctttcgctggcggcagcagtagcgcgtttcgccactggcaagctgagcaactggctgattgcgcgctttctctggtgacctggccggggcgcgatcgccttcgccatctggaaccgctcagaagcattacacaactggcggcactgctggcgaacgagctggaagcatccgtatcgcctgacacgccgcttttactcgccgggcacagcatgggggcgcaggtggcgtttgaaacctgccgacttctggagcaacgggggcttgcgccacaaggactgattatttccgggtgccatgccccgcatctgcattctgaacgccagctcagccatcgcgatgatgccgactttatcgctgagctgatagacattggcggatgttctcctgaactgcgggaaaaccaggaattaatgtcgctgtttcttcctcttctgcgcgctgatttttacgccaccgagagctatcactacgactcgcccgacgtctgtccgccgctgcgcacgcctgcgctgttattgtgcggcagccacgatcgcgaagcctcctggcagcaggtcgatgcctggcgtcagtggctgagccacgttacaggcccggtggtgattgacggcgatcacttctatcccattcaacaagcccggtccttttttacgcagattgtccgccattttccccacgcattttctgcaatgaccgcgtggcaaaaacagcccagtacttcagaaaggtgacgcatgaattcttcctttgaatctctgattgaacagtatcccttacccattgccgaacagttgcgccactgggcggcccgttatgcctcgcgaattgccgtcgttgatgcaaaggggtcgttaacctacagcgcgcttgatgcacaagttgacgaacttgccgcaggtctgtcatcactgggtttgcgttcgggggagcatgtaattgtgcagcttcccaacgacaacgcgtttgttaccctgctgttcgccttgttaagactgggcgttatccccgtgctggcgatgccctcgcaacgggcgctggatatcgacgcgctgattgagctggcgcaacccgtcgcttacgttattcacggggaaaaccacgcagagctggcccgacagatggcgcacaaacacgcctgcttgcgtcatgttctggtcgctggagagaccatgagcgacgattttacgccgctcttctcccttcacggtgagcgacaggcatggccgcagcctgatgtttccaccaccgcgttgttgttgctctcaggcggcacaaccggcacgcccaaactcatcccgcgccgacatgccgactatagctataacttcagcgcttctgctgaactgtgcggcatcagccaacagagcgtgtatctcgccgtcctcccggtggcgcataactttccgctggcctgccccggtattctgggaacgcttgcctgcggcggaaaagtggtgctgaccgacagcgccagctgtgatgaggtgatgcctttaatcgcgcaggaaagagtgactcacgtcgccctggttccggcgctggcgcaattatgggtgcaggccagggagtgggaagacagcgacctttcgtcgctgcgcgtcattcaggcaggcggcgcccggctcgacccgacgcttgctgagcaggttatcgccacctttgactgtaccctgcaacaggttttcggtatggcggaaggcctgctctgttttacccggctggacgatccgcatgccaccattctccacagccaggggcgcccgttgtcccctctggatgaaatccgcatcgttgatcaagacgagaacgacgtcgcgccgggcgaaaccgggcaattgttaacgcgcggcccttataccatttcgggctattaccgcgcccctgcccacaacgcgcaggcctttaccgcgcaagggttttaccgcacaggcgacaatgtcaggctggatgaggtggggaacctgcacgttgagggacgcataaaagagcagatcaaccgcgccggagaaaaaatagccgcggctgaagtggaatcggcactgctgcgtttagcggaagtgcaagattgcgcggtggtcgccgcgccggacacgctgcttggcgagcggatttgcgcgtttatcatcgcgcagcaggtgccaactgactatcagcagttgcgtcaacaactgacccgtatggggctcagcgcgtggaaaattcctgaccaaatcgagtttctggaccactggccgctcaccgccgtcggcaagatagacaaaaaacgcctgacggctctcgccgtcgaccgttatcgccattctgcccaataagcgcaaaccgacccgaaacaggttgaaataaacccgtttcgggtagcactactattagaaatagttatcattttcaattcaccattgtcggtatttttggcgtttcgccgtcttacagggactcacaacaatgaaaatgacacggctttatcctctggccttggggggattattgctccccgccattgctaatgcccagacttcacagcaagacgaaagcacgctggtggttaccgccagtaaacaatcttcccgctcggcatcagccaacaacgtctcgtctactgttgtcagcgcgccggaattaagcgacgccggcgtcaccgccagcgacaaactccccagagtcttgcccgggctcaatattgaaaatagcggcaacatgcttttttcgacgatctcgctacgcggcgtctcttcagcgcaggacttctataaccccgccgtcaccctgtatgtcgatggcgtccctcagctttccaccaacaccatccaggcgcttaccgatgtgcaaagcgtggagttgctgcgaggcccacagggaacgttatatggcaaaagcgctcagggcgggatcatcaacatcgtcacccagcagccggacagcacgccgcgcggctatattgaaggcggcgtcagtagcagcgacagttatcgaagtaagttcaacctgagcggccccattgaggatggcctgctgtacggcagcgtcaccctgttacgccaggttgatgacggcgacatgattaaccccgcgacgggaagcgatgacttaggcggcacccgcgccagcatagggaatgtgaaactgcgtctggcgccggacgatcagccctgggaaatgggctttgccgcctcacgcgaatgtacccgcgccacccaggatgcctatgtgggatggaatgatattaagggccgtaagctgtcgatcagcgatggttcaccagacccgtacatgcggcgctgcactgacagccaaaccctgagtgggaaatacaccaccgatgactgggttttcaacctgatcagcgcctggcagcagcagcattattcgcgcaccttcccttccggttcgttaatcgtcaatatgcctcagcgctggaatcaggatgtgcaggagctgcgcgccgcaaccctgggcgatgcgcgtaccgttgatatggtgtttgggctgtaccggcagaacacccgcgagaagttaaattcagcctacgacatgccgacaatgccttatttaagcagtaccggctataccaccgctgaaacgctggccgcatacagtgacctgacctggcatttaaccgatcgttttgatatcggcggcggcgtgcgcttctcgcatgataaatccagtacacaatatcacggcagcatgctcggcaacccgtttggcgaccagggtaagagcaatgacgatcaagtgctcgggcagctatccgcaggctatatgctgaccgatgactggagagtgtatacccgtgtagcccagggatataaaccttccgggtacaacatcgtgcctactgcgggtcttgatgccaaaccgttcgtcgccgagaaatccatcaactatgaacttggcacccgctacgaaaccgctgacgtcacgctgcaagccgcgacgttttatacccacaccaaagacatgcagctttactctggcccggtcgggatgcagacattaagcaatgcgggtaaagccgacgccaccggcgttgagcttgaagcgaagtggcggtttgcgccaggctggtcatgggatatcaatggcaacgtgatccgttccgaattcaccaatgacagtgagttgtatcacggtaaccgggtgccgttcgtaccacgttatggcgcgggaagcagcgtgaacggcgtgattgatacgcgctatggcgcactgatgccccgactggcggttaatctggtcgggccgcattatttcgatggcgacaaccagttgcggcaaggcacctatgccaccctggacagcagcctgggctggcaggcgactgaacggatgaacatttccgtctatgtcgataacctgttcgaccgtcgttaccgtacctatggctacatgaacggcagcagcgccgtcgcgcaggtcaatatgggtcgcaccgtcggtatcaatacgcgaattgatttcttctgattattgtaaaagggataccgaaaaggtatcccttttacaccactagttaaaaccagtaactcagcagagtcgcaaaaaatattaatccatagtgattatttaaacaatgaaattgcgattaggataaatagatttaactttctcgttcctttctctccttatactaaagaaataatcatatcaaaataaaaattcacaacagtgcaacattaaaaaatacaaccaacaaacaatcctatatacaaggcacatctccagaatataaaagcacagacaaacaacctaaaaaacaatcccatacatataaattattttataggtaaaatagattatatattctcatagctaccataaactatactagcctgaactatatttattctgctgcaatcaatgcatacataacacaaatatcactcaggtacactactcaaaccacgctgggatttttcctcaagttataatcatcaccccgaaaatcattcggcatttactcattaaatagtcaccccataggcctgtacatgtttactcagaaatatacatccttttctctgtcataaaccctctgattaatcataaataaatacttgtgacaccaatctttttccttaacggaacgaattgttgtgtagaaggagataatattatgtcaaaaaaatatcagccattgcttataactcattatatgtcaacatgggtcactataacggaagcagttgagatcactaccaaagccataaaacaaaaaattactcctagcgatatttatcgtcatgccttgagtggcaacatcctactattggtctatttccagtctcctgtgatacttaagaagatacaaacttttaatggaaaaataaaattcaggcagtttgtgggagacctacttgataaactatgcatgcttgacagggacggttttatttatggtcaaaatttaagactctgtacagaagccagatatatttgtcctgtgcaacaaattatagatacccccctgttacgcaaactcaaccagtttcgtacgtttgttcgtaatgtccgcccgggtgatgaactggatctccaggcacaagttagtgaaaaaaatttaaccccgccgccgggtaacagcagtggcaaccttgagcaacagatagccagtacttcacagctaattggatctctgctcgccgaagatatgaacagcgagcaagcggcaaacatagcacgtggatgggcctcttctcagacttcaggggtaatgacagactggttaagccgcttcggtaccgcaagaatcacgctgggcgtggatgaagatttcagcctgaagaactcccgtgacggcaaccctcgaaaatggcgattcgatgcaacaaacagtgaactatgtgccgaacgtcacgaatgctgaaatcacgctggcagccttgaagaatccggtgattgccgacaataacgatctcacgacactaacagcaccgtcgctgatacagagggcaatgcgatagccaacactgaggtaacatttactctaccggaagatgtgaaggcgaacttcacgctgagcgatggcgacaaagcggttactgatgccgatggcaaagcgaaagtcacgctgaaaggtacaaaagcaggcgctcataccgtgacagcatcgatggttggcggtaagagtgagcagttagtggtgaactttactgcggatacgctcactgcgcaggttaatcttaacgttaccgaggacaatttcatcgccaataacattggaatgaccaggctacaagcaatagtgactgatggaaacggcaacccagtagaaggtataaaagttaatttccgtggaacctccgtcacgctaagcagcaccagcgttgaaacggatgatcaggtttttgctgaaattcttgtgacaagcaccgaggtcggactaaaaacagtttcagcctctctggcagataaacctactgaagtcatctcgcgattactgaatgccaaggtagatgttaattctgcgacgattaccagtcaggagatacctgaaggtcaggtcatggtcgcacaagacatagcagttaaagctcacgttaacgaccagtttggcaacccggtgacgcatcaagccgcgacattcagtgcagcgccatcctcgcaaatgatcatcagccagaacacggtctctactaatacgcagggagtagccgaggtcaccatgacgtctgaaagaaacggctcgtatactgtaaaagcatccctagcgaatggagcttcacttgagaaacaactggaggctattgatgaaaaactgacactcacgtccagtccgcttatcggtgtcaatgctcctaaaggcgctactctgacggcaacgctaacctctgcaaatggcactccagtggagggtcaggtcatcaactttagcgtaacgctagaaggtgcgacgttaagtggcggaaaagtgagaaccaactcttcaggtcaggctccagtcgttctgaccagcaataaagtcggtacatatacggtgactgcatcgttccataacggcgtcacaatacagacacagacaaccgtgaaggttactggcaacccaagcaccgcacatgttgctagctttatcgctgatccgtcgactatcgccgccaccaacagtgatttaagtaccttaaaggcaacggttgaggatggcagtggtaacctgatcgaaggtctcactgtgtacttcgccttaaaaagcggctccaccacattaacgtcattaacagcggtgaccgatcaaaacggaatcgcgacaacaaacgtgagatgagcgataacagggagcgtcactgtaagcgcagtcataagcgcaggtggaatgcaaacagtagatatatcgctagtggcaggcccagcagacgcctcgcagtccatccttaagaacaaccagtcatcactgaaaggggactttaccgatagtgctgagctacatcttgttctgcacgatatatcaggcaatccgatcaaagtttctgaagggatggaatttgtgcaatcaggtacaaacgtgccctatatgaaaattagcgcaattgattacagtcaaaatatcaacggtgattacaaagctactgttacaggagacggagagggtatcgcaacgctgatccccgtattgaatggtgttcatcaggcgggcctgagtaccacgatagaattcattagcgcggaaaccagaccaatgatgggtacagtgtcagtgaatagtgcaaacctaccgacagcttcattcccttcgcagggatttaccggggcgtattatcagttgaataatgacaactttgcaccaggaaaaacggcggctgattattcgttttcaagctcggcctcctgggtaggcgttgatgctactggtaaagtgacattcaaaaatgacggtgatagcaatacagtaataatcacagcgcccccaagatccggtggtgctatttaccaaacagttcctcctgaatcgcgttcggtgtgactatgatcattttcggtgagtattgctttgatccaaaggctggttttctgtgatgattgaccagcctcagagtattgatgacaccaccgttcataacagatcggcattactatgcataagtactgcctcaagttctcgccaaaacactttttaatgcctttgcgaattcatccagacttatattatcaattttttgcccaacgacgactgactccgaaacatcggccattgcgggccatcgcgttttgtaatcagcataaattgcaacaacaggggtattataggcacttgccatatgtaatattgaggtgtcaggagttattgcaatataagcatcttttatgattgctgctgaacgtttaatcgagggtgataaggataaacggtagacattattataacaatccactaatgccctggctttatcttcccctttgggtccataaacgatcactattggaatatctgtttcactttgaatttttgctattagattttctgcaatcgataatgaaaatgtacgttcctgcgagctaccgtctaaattgagcgcaatgtaagatcctaacgatcgcatttcctcgcgtacctcatcgagtacatcatcgcttaatggcaattcatatattgacctgactgccggaaacccgcctcacgcatcataaatgcccatgtcatgggtacaggagtccggagattctgatccatccgggacgcgttcttacacaaaggggaatagcacttcatggttaaaccgacgacctggaaattcgtttttgctttcaactgactgataaatatcatcgttttcaggttctttttacgcatcgcctctatacaaagatccggcgtaccgtattgcagtgttatattcttcgctaaatcttttatttcttttaatgttgcgtgatcctgcatagtcattgtgactaatgttaatttagtctgttcaagtttgagcgcattaaagacttctaaattaattgtcgacataacaattaatagatgcttaattttatgcaattcaagcgcccgaataacaggaaagatggccatagcatcgccaatctgatcgggaatatgtatgacaacaaagtctgttttttcaatattaaaattataagctttataatcgtagtaactaaatgcaatacgtctcaacaatgatactaaaaacataactaacctcgcctccctactggttataatgcaatgcagtctatcagaatcatcagggtgcaattttgtgcatatgcggacttttatgtttcatatctcgaacctgtgggccctctgcttaatccttaaacaacaccagcaactcctgcgctttcatcttccatcgaatttttcatgttgccgctaatcagccataaaatcatttgcagatgcgctctgtcgaggtagtctcataaggttcgtttatagatcgacggcaatgtgagttaccttttccatactaattataaaaagacagtacaaacaggatcattatggactccacgctcatctccactcgtcccgatgaagggacgctttcgttaagtcgcgcccgacgagctgcgttaggcagcttcgctggtgccgtcgtcgactggtatgattttttactctatggcatcaccgccgcactggtgtttaatcgcgagtttttcccgcaagtaagcccggcgatgggaacgctcgccgcatttgctacctttggcgtcggattccttttccgtccgctcggcggtgtcattttcggtcactttggcgaccgactgggacgtaagcgcatgttaatgctgaccgtctggatgatgggcatcgcgacagccttgattggtattcttccttcattctcgaccattgggtggtgggcacctattttgctggtgacactgcgtgccattcagggatttgccgtcggcggcgaatggggaggcgcagcgttgctttccgttgaaagcgcgccgaaaaataaaaaagccttttacagtagcggtgtacaagttggctacggagtaggtttactgctttcaaccggactggtttcattgatcagtatgatgacgactgacgaacagtttttaagctggggctggcgcattcctttcctgtttagcatcgtactggtactgggagcattgtgggtgcgcaatggcatggaggagtccgcggaatttgaacaacagcaacataatcaagcggccgcgaaaaaacgcatcccggttatcgaagcgctgttacgacatcccggtgctttcctgaagattattgcactacgactgtgcgagttgctgacgatgtacattgttactgcctttgcacttaattattcaacccagaatatggggttaccgcgcgaacttttccttaatattggtttgctggtaggtggattaagctgcctgacaattccctgttttgcctggcttgccgatcgttttggtcggcgcagggtttatatcacaggcgcgttaatcggaacgttgagcgcatttcctttctttatggcgcttgaagcacaatccattttctggatagttttcttctccatcatgctggcaaacattgcgcatgacatggtggtgtgtgtgcaacaaccgatgtttaccgaaatgtttggtgccagttatcgctacagtggtgctggagtcggttatcaggttgccagtgtggttggcggtggatttacaccttttattgccgctgcactcatcacttactttgccgggaactggcatagcgttgccatttatttgctggctggatgcctgatttctgcaatgaccgctttattgatgaaagacaatcaacgctcgtgatagcctggcgaagatcatccgatcttcgccttatacttttgtttcacattcctgtgacatactatcggatgtgcggtaattgtatggaacaggagacacacatgaataataagggctccggtctgaccccagctcaggcactggataaactcgacgcgctgtatgagcaatctgtagttgctttacgcaacgccattggcaaatatattacaagtggcgaattacctgatgaaaacgcccgcaaacaaggtctttttgtctatccatcactgaccgtaacctgggacggtagcacaactaatccccccaaaacgcgcgcatttggtcgttttactcacgcaggcagctacaccaccacgattactcgccctactctctttcgttcgtatctcaatgaacaacttacgttgctgtatcaggattatggtgcgcatatctctgtgcaaccctcgcagcatgaaatcccttatccttatgtcatcgatggctctgaattgacacttgatcgctcaatgagcgctggtttaactcgctacttcccgacaacagaactggcgcaaatcggcgatgaaactgcagacggcatttatcatccaacggaattctccccgctatcgcattttgatgcgcgccgcgtcgatttttccctcgcgcggttgcgccattataccggtacgccagttgaacattttcagccgttcgtcttgtttaccaactacacacgttatgtggatgagttcgttcgttggggatgcagccagatcctcgatcctgatagtccctacattgccctttcttgtgctggcgggaactggatcactgccgaaaccgaagcgccagaagaagccatttccgaccttgcatggaaaaaacaccagatgccagcatggcatttaattaccgctgatggtcagggtattactctggtgaatattggcgtgggaccgtccaatgctaaaaccatctgcgatcatctggcagtgctacgcccggatgtctggttgatgattggtcactgtggcggattacgtgaaagccaggccattggagattatgtccttgcacacgcttatttacgcgatgaccacgttcttgatgcggttctgccgcccgatattcctattccgagcattgctgaagtgcaacgtgcgctttatgacgctaccaagttagtcagcggcaggcctggtgaagaagtcaaacagcggttacgtactggcacggtggtaaccacagatgacaggaactgggagttacgttactcagcttctgcacttcgttttaacttaagccgggccgtagcaattgatatggaaagtgcaaccattgccgcgcaaggatatcgtttccgcgtgccatacgggacactactgtgtgtttcagataaaccgttacatggtgagattaagcttcccggccaggctaaccgtttttatgaaggcgctatttccgaacacctgcaaattggcattcgggcgatcgatttgctgcgcgcagaaggcgaccgactgcattcacgtaaattacgaacctttaatgagccgccgttccgataataagttatgaaccttcttatcagaaatagatgtgaaggattaagtaagacatctggcaaatagcctgcaataaacgcgggctgtttgcttccttgggcagatgcgagttttattatcgtcttaatgatttccacatattaaaagcaagtatgctttcaaaacacaattataaaaaatcccgccaacaacattagtttttataaaattaaatataagattatggctttagaatatttttatttctaatagacgagatttttcctgttatgatataatatgtcgaattaacacatgttaacgatttaccagtaatgtaaataaattttcgaggagatcattccagtgggacgtaaatgggccaatattgttgctaaaaaaacggctaaagacggtgcaacgtctaaaatttatgcaaaattcggtgtggaaatctatgctgctgccaaacaaggtgaacccgatccagaattaaacacatctttaaaattcgttattgaacgtgcaaagcaggcacaagttccaaagcacgttattgataaagcaattgataaagccaaaggcggcggagatgaaacgttcgtacagggacgttatgaaggctttggtcctaatggctcaatgattattgctgagacattgacttcaaatgttaaccgtacgattgctaacgttcgcacaattttcaataaaaaaggcggcaatatcggagcggcaggttctgtcagctatatgtttgacaatacgggtgtgattgtatttaaaggaacagaccctgaccatatttttgaaattttgcttgaagctgaagttgatgttcgtgatgtaactgaagaagaaggtaatattgttatttatactgaacctactgaccttcataaaggaatcgcggcgctaaaagcagctggaatcactgagttctcaacaacagaattagaaatgattgctcaatctgaagttgagctttccccagaagatttagaaatctttgaagggcttgttgatgcccttgaagatgacgacgatgtacaaaaagtttatcataacgtcgcaaatctctaatgatattttaaagaaatctgtctttatggcagattctttaatctcatataattcttataaaaatataatgtttaactcgtcatattgcttataaaaaatccccgttcccagagaaataatatttattaaaatggcaggtcttctttttctgattacagaaggcaaagtggcaataacgcatagtttcccggtaaagacgcgatagcgacatcccgcataaggcatttttctctttatctttgtacggtacttcatggaacagagtttttgaccttgcgaatcgtgatgtctgttggggggcaacttgctcactgaagcgtgagactcgattaagcgcacgaaacacagaaatcaaaaaacccggtcacttttttacaaggtaaccgggtaaaaataatttttattttttaactgttttgagactcatagagatgtctcaaaactaaaatttggctcctctgactggactcgaaccagtgacatacggattaacagtccgccgttctaccgactgaactacagaggaatcgtgagaacgaggcgaatattagcgatgcccacccacaatgtcaaagcctgttttttaaatttgaaatcgtttgctgaaataatctgcattttgtcgtttattccgacacaactggctttttttcacacttttgcggctcgggtcgagggtatttccatagccaacgtccagtaaccattcgccagtaaaacagcacggcccgcacagcccagtcggcaaacattcccatccagacaccaaccacaccccagccaagcatgattcccagcacataaccgactacaacccgacaaccccacatgctcaacatcgaaacccacatggcgtaacgtgcatcgcgagcacccttaaatccagcgggtagcacccatgaggcagaccaaataggcataaataaagcatttagccaaatcagaatcacaacgacatgtttaacctgtggatcctgggtgtaaaacgatgccataaccccggcaaagggagccgttagccaggcgatggccgttaatccaagagtggaaagccagaacacatgccgcaactgaatctctgcttgcgctatctgtcctacacccaaccttcggcctgtaatgatcgtagaagcagagccgagcgcacttccgggtaagttgataagagccgcaattgaaaacgcgataaaatttccggcaataacactggtccccatcccggcaacgaacatttgggttaataaccgaccactggtaaataacactgattcgacactcgcgggaataccaatccccatgacttcccagataatgctaaaattcagcggtttaaaatagctctttaacgaaatccttagcgcaggattaaaaccaatcgccagcacccacaaaattgccactgcgccaatataacgagaaatggttaaccccaacccagccccgacaaatcccagtcccggccaggagaaaaggccgtaaatcaatatgccgctaataataatattaagaatattcaggctaccgttaatcagtagcggtattttcgtattccctgcaccacgaagtgccccgctaccaatcaaagtgatggcagctgctggataactgagtaccgtcagctccagataagtcaacgccagtgctttaacttctgtcgtggcatcacccgcgacgaaatcaataatttgctcgccaaaatgatgaataagcgttgccaacagtacggcaaacaacgtcatgatcaccaatgactgccgcgtcgccaccctcgctcgtcgtcgatcccgcttaccgagactaaatgccacaacgacagtagtaccaagatcgatagcagcaaaaaagccataatgaccatattgaagctgtccgccaatcccacgccggccatcgcatcttttcccagccagctgaccagaaaagtgctcagaacccccatcaccaggacacaggcattctccatgaagataggaacagcaagcggggttatctcgcgccagaacaacactttgtagctcttgcgtttagcgtgccagcgagtgccgtgaacaacctggcgtaaagcagaggagatattcaaagccgaccttaattgcagaaagtgaaaccacatttcaaataatgagggagaatcagcaaagctgcaaagattttcgccaacaaattgtctgcaaatgcaacaaactgttgatagaaacggcaaacagttgggaaaattaaaaatcgggtttgacaaaagatttttcgccgttaagatgtgcctcaacagcgattcctctgtagttcagtcggtagaacggcggactgttaatccgtatgtcactggttcgagtccagtcagaggagccaaatttctgaaaagcccgcttttatagcgggctttttgctatatctgataatcaatttcctcttcactgttttccatcacctgccgcttgatatcctcaactgaaagtcctgcattacaaagttccagaaagcgccagacatagttacgctgaagttgtcctcgcttcagtcccaaccagacagtattagcatcaaaaatatgccgcgtatccaggcggattaaattcttttcctcttgttcaccgctggattgttcggcaactattccgatcccaagcccaagagcaacataggttttaatgacatcagaatcctgcgcacttaatacaatatctgccagcaaacctttgcgggcaaatgcgtcatcaatacgtgagcgccccgtaatcccctgtcggtaagtgattaacggccacttcgctattgattccagcgtcaatggtgtaatttgcgtcaagggatgatcgagtggaacaagcaaactatggtgccaacgaaaccacgggaaggcgacgagctgcgggtcattactcaaacgctcgctggcgataccaatatcagcttcaccattatgcaacaacgtcgcaatttcctgtggcgtcccctggattagctcgagccgaacctccgggaaaagttcgcgaaaagatttaatgacctctggcaaactataacgtgcctgagtatgcgtcgttgcaatagtgagaacgccagacgtatcgttggtaaacaggtctgcaagccgacgaacattactggcttcattcagaatacgttctgcaatgaccagtaatgctttgcccggttcagtcatgcccagcagtcgcttacctcgtcgaacaaatatttcgatgccaagttcatcctccagttcccgaatatgacgctgacgccggactgtgaggtaaaaagcatattcgcaacctctgtcaggttgtaatcctgacgtgcagcctcgcggattatctttagttgttggaaattcacggtaaactccgggcagttcagattttccgttattgttaaagtctaatgcccggcataacaaataataaaaacccgcatcttattccatcccgatataacgcttagctcaccaattgccactgccttttttccatcactggagaactcatcactgacattaacaactctttcactgcctgtgcttgtggtgataagttcgctctggcgggtaaatttaatgacaaagagagactcatggaaggtgtggtaatgcgtgacatccacccgtttactgcgccacataacgaacgcgcggccgattcgggtaatactgcaacgcccatgccgctggcaatcgctgcggtaagcgtggcaatagactcaatttcaccaatgacttttgccgtgagtcgccgtagggaaaaagcctcatcaacacgaagtctaacagcactgtaatcactgggaagaaagaggttcatttgcgcaatagcattaacatcaacactttgccccggacaatcttgagtccctaccaggaaaagatcttctttcagtaaagcctgactggatacaccagccacaggggaatgctcataaatcaccgccatatcgagttggtgatttatcagtttttcgttaagcactgcaccgctattttcatgaagatagataacgacctccgggaattcagcgcgaaccgcctgtaataagggcatggtgatggatgacgcagcggttcctggcgcaaagccaatcgagacttgccccgataatgcctgaccaacgttatgcaccgccagttgggcctgctcacactgacgtaaaatggcccgcgcatgggtatagagaatttttccggcgtcagttggcgtaacgccccgttttgtgcgaatcaaaagttgttgattaaactcaccttccagtgtggcaacctgctggctgagcgctggttgtgcgatatgcaatacttcagcagcctgggtcaggctaccaatatctacaatttttacgaagtatttcaggcgtctgaagttcatgttgcctccggtttttaagagtcggcccaagtgccgccattacttacaaccagaatgcaagatgcttgccagttctattttggcgttgatgcgcaagctaaccaactgtcaaataagagattatgatagattcgtcattggctctttttatctgcagtcgcattcacctgccctataaaaggagggtatgcaccacgatggttcattacccaataagattgaaagctcaccactttgttgaaattggcagcaaaaaaacaaaaaaatgcatttcaccctttgacatcaccatgcactgccattaatatgcgccccgttcacacgattcctctgtagttcagtcggtagaacggcggactgttaatccgtatgtcactggttcgagtccagtcagaggagccaaattcaaaaagcctgctttcgagcaggctttttactttctaattatcaacgctcttaaaacatctgtcttgaaccagaactaatttgcacaggcattcccgatcgacgttgcaacgcagcatttgcgcgatttacatcaacttcttgcccgttgataaacgcccgcaaagatggggttaccggcaatggcacttttcggtcagactcatattctgcacgattgcgcgacagcggctcatgaacttccagccactttgaaccatccggttccgttgtgtatttcactggctgatcaataatttgtacacgagtgcctacaggaacattatcaaacagatatttgatatcgtcattacgcagacgaatacagccctgacttacacggagcccaataccaaaattggcattggtaccgtggatggcatacaacctgccaatataaatcgcgtacagccccatggggttatcgggccccgcaggaacaaatgcgggcaaactctcccctcgtttcgcatattcgcgccgggtgttcggcgttggcgtccaggttggtgcttcttgtttacgttcaacggtagtcacccagttacgcggggtttctcgcccagcctggccgataccaataggaaagacttccactgtattactgtctggcggatagtaataaagacgcatttcagcgacgttaaccacaatccctttacgaacagtggcgggcaaaatcagttgctgcggaatggtgagttgtgagccaggcttcggcaaaaaaacatcagcgcccggattcgcttccagcatgttacttaacccttgcccgtattgtgcggcaaaagtctccagcggctgggtattgtgatcaggaacagttacagtaagcgactgccccaccaaacggctaccctctggaggtaatggataagttaccgccaggctagtatggctggcaaaaagcagagcaaatgagcaaagaatatttacacgacgcatcatgtccctttcctatgtcgcgaaagctatccgttaagtatagcttttatcagacttttcgtttttaactgttcaaatcagaagtcgtattccccggtagaacaatattactggcagcaagttcgcccatgttgttatatatcgcacaggcagcttcgatgatgggcatcgccagagctgcgccactcccctcacctaaacgcatctccatattgagataaggctccagccccaaatgcgacagcgctatacgcgcccctttttctgccgacaggtgagaaggaatgagatactgtttgattgcaggagacatctggcaggctgcgagcgcagcagcataagaaagaaatccatccagcaacacgggtaaaccgcaggaagcagcgcctaacatcacgccagccattccgaccaaatcaaatccccccacttttgccagaacatcaacgccatcctgcggatttggttgattcaacgtaatcgctcggcgcacaacatcaattttattagccagtttatctgtcggcaggtttgcgccaatcccaaccacttcttcaggatcccggccagtgattgtgctgactattgccgctgccggtgtcgtgtttgccatccccagttcacctacaccaaacagcgtgacaccgttttttgccagctcccgcgtataacatatgacgtccaaaagcaacttttcagcctgacggcgactcattgccggagctgaagcaatattgccgctacctcgtgcgacacgcatgttgataagcccggggataggctcagcactatcaataccaacatcaactacgtggacgttagcgcccgcttgtgttgccagcacacacacgccggttgttccgcgggtcatattttcagcctgaatggctgtcacttcttttggggaaatagcgaccccttcctcccagacgccgtgatcggcacacataaccagtaccgcttttttgcccacatgcggtatgccattcaaccccggcattcccgccagttgtatggcaagcgcctccagccttcccaggctaccaacaggtttgagtaacccgtcaatatgccgttgtgcacgcgacatagcggcaggatcgatagcagggatcgtattcagtaaatcggcaagtgtttgcatgtcacgtctctttatagcagtgccagcaggaagaccagttcaccaagctctatagcagctcccagcgtatcgccggtttgcccgcccagcgtacgtttgagaagctgaccgaggatgaaaatcgccaccatcgtcaccaccatagcagccacaccatgcatacccggcaataatacggcagcaaaaatagcggctaagccgagtgtgacgcaggtttgtcgcccatcaattttgccaatgaacacattgccaagcccttcttcccgggcataacgatgacgatacatcaataatgcggcagtcccgcggctgaccgcacatgctgccgccagcgatgcaaggatcggttcgccacgcagagccaactcgcttaataccagaatctttgccagtacaacaaaaatcaatgccagaccgccatgggtgcctaaacggctatcacgcatgatttccaacatgcgatcgcggctacgtgcagaaaatacgccatcacaggtatcggcgaggccgtccagatggaatcccccggtcatcagcgccagcacaagtacgctaaacagtgccgccagtggtacgccacaccatgcctgcagcaccatgaagaccagcccgctaatcgcgccaagcaataatccaattaaaggaaaagtaataataccgcgagaataatgctcgaaatccagtccctgggaccagcgacgcggtacaggcagacgcgtaataaatgagagcatcgcccaaaataatttactcatttgatttttactccaatacccgaaaccaccagccatacttcatttgccgcagcggccagctgctgatttacccgcccggcaatatcacgaaaatgtcgtgccagacgactctccggcacaatccccattcccacttcgttagtcactaatacaacctttgcggggcaacgttggcaggcagcaatcaacgactgaatctcagcattaatcgcctgttccatcgcctgataatcccattcatcagggtctttatcgccgccataatcaaacaacagattagtcaccattgtggtaacgcattccagcaacacaacctcattcgggttaatgtctgcatgaattaattcatcaagatgttgccagcgctccactgtgcgccagtgctccgggcggccttgccgatgatgttctatccgtgcagccatctcatcatcaaggatttgcgaggtagcgatatacagaacctgtgaagagtccccaataagcgcctctgcgtggcgactcttcccgctccgtgcgccccccgtcaccaaaatcatcataccgactcctgattcaattgtatgatggtattcattgaacagaacaatggatcccccaccattgctgaccgcaaaacatttacacgatcaatactgcgcgtaatataattaaaaatccagcattctcaatccattacgaaagaagatggcattgtggaatagccagacttcctcgtgttaacgtccgacaaaatgcgtcattgacagcggtttctgtggattgacacatttcattcagataatgaattaatgctactgccggaccaaccagcaaacgggcattgtgttctgaaatccaggctattgattcaacgtcagcgacagatctgcgctgtaaaagaacttgtaaaacaacgcaatagaattatccggaatggtggcgactatgcactagaacaccacaaattcgctctctcggtaaggcactgtcacagcattcaacagaatgtgacttgccagatttattagcgccaccagatgtttaaccgggtaaccacgacccagtcggggatatattccatcttctcgctgacatcatcaagaataaaaaggtttatcacactcagagcaacgttcttcagcaggcgggataattcttcaacatttaaaagatgtgttattaaaggcatacaaactggacgtattgtattttcttttggtggttgacctaaggtagcagtttatcctgatgcgctgagatttctgtaatatctacgtcaacattctcctcgaatagaaaatgcagccccggcaagtgattcacattttttaacaaaacgttgttagcgtgccattttcagaagctctccaagaaagcgaattcttttctcaaattctgcattctcagacacagctttctactccatggcaatggcccaaatacgaagttgctcaggatcattagtggtgctgagaagttaaataaccatgcggagtaccactcgtcatcacgtatttatatatcatgaagctattgttgtgttttgtacatcagtagatgtattctgatatactccttttgctagacataacctttcacctgcttgcaaagcttctgtgttctgacattgccaaattgttgcaattctgtatccagccttctttcagtcatagcttcgggccgcgataagactcactgatctgaccctgattcctcttgcagactttatagaccaattaaaatgcagtttctgcaggtcaacgtctgaccatcattgtcatcactctggccattagagtaaccttctgcattcatccttttgtaaaaagtttatagactggccccctgaatctccagacaaccaatatcacttaaataagtgatagtcctgatacaagtttttagagtagtcattagtgaacagataattgttaacttagaaccagtaaaatgcaaacgacgcaccacgctgggaaaatcgctgctattcagcagagttttgtaccgagaattgtggccagccacttattgctctcgcgtaagcaggtatccccatcgtttaccagtccagcacatcttgtggtcaggcagaagaagagcaaactgttactggactcactgcatgcatgcatgcatgcatgcatggtggagaaaaatgccacgctatccaaaaatccagactgggagaatggttcagctgtgtactgaatcagtggggcgcactctgttattacagtgttgacggtcaggcggaggcagacataatgccgcggaaaaagccctttgtgccatctgtctcggaaataaaaactttatgttcttcggcggcgagcgcagtgcactgttgtatgggcttatcggcacttgccttctgaacgacattgatccggaagcgtatctgcgccatatcctgagcgtactgccggaataaccttccaaccgtattgatgaactcctgccatggaacgtagttctcaccaataaataagcatcaatatgattctccattaacgcttaccttttctcaggctatttttgcttttttttgcttttccccgccactttatggtgattatcacatcaatatacatcgatagatattaacgtaactgcagtgaggtgaagcatgaaatttgaacgccatcatgaaatattgaaacgactcagtaaattcggttctgtaaaagtatccgatctgtccaatagcctcaatgtaacgaaagaaactattcgttcagatcttaatgaacttgccaggcttggctatctgactcgatgtcatggcggtgcttttatcgtcctagactcgcttgatactattgcgaaaaatgaaatcgcttatgcgcttgaaaattatgatacagcccagggaataaaaaaaggccactcaactatgaaaagtcaagtatgcgttattggttcgtttaatgttgatatcatcagttatttgccgaggcttcccactatcggagaatcgcttctggcaagtaattttatattttcaccggggggaaaaggctgtaaccaggcgctggcagcaagctttgccgatactgatgtttatttcataacaaaagtaggtacagatcactttagtgattatgcgatcaactttatgaattcgtctaagatttataaaagtataatttatcaaacgaaagaaacgcaaaccgaaactgccacgatccttgttaatgaaggtactggcgataatgttattgcgatctatcccggtgccaacatgacaatgtcgtccgatgaaataactattcagaaagaagcgattattaattctgatgtcatacttctgcagctcgaaacaaattataccgctctgcaacaagcgatcacattggcgcaaaaaaacagtatcccggtcattattaacccggcaccctataatgatatcgtcaacgaacttattcaggatgttgattatatcacccccaatgaaacagaagctggtttactgtccggcatagacgtacacgatcttgaatcagctaaacgagctgcagaagctatccacaataaaggggtaaaaaacacggttatcacgctcggtagcaagggctcgctcgcatttgatggcaaaaaattcattcattcgccagcgtttccagcggtcgttaaaaatacggcaggagccggggatgcgtttaacggctctctggcatcaggacttgcgaaaggaaaatcactggaatcagcactgtgttatgccagcgcctttgcatccctagcggtggagacaagcaatgcttccgacatgcctgaacatgaatctgtgatacatcgaattcagagtatacattatcagcaaactatttttacgcattaagaagggacagagaatgaataacaccaaaaaatcactaaaagtgctctttattggggaatcctggcatattcatatgattcattcaaaaggatatgacagttttacctcaagtaaatatgaagaaggtgcgacctggttactccagtgtctgaaaaatagtcaggtagatgtcacctatatgccagcacatacggtacaaattgccttccctgaagatgtggcacagttagaacaatatgatgccatcgttattagtgatattggtagtaatactttcctgctacaaaatgatactttttatcagcttcgcataaaaccaaacgctctcgaactgattaaagaatatgtgaataacggtggtgggttattgatgattggcggctatctctcattcatgggaattgaagcaaaagccaattataaaaatacagttctggctgatgtgctcccggttacgatgttagatggtgacgatcgtgtcgaaaaaccagagggtgttattgcacagccatcacaacctgaacatccagttattaaagggttctctgaatatccttttttcctaggttataaccgggcgatcgctaaagaaaatgctgaggtggtattaacaataaacaacgctccattactggtctttagtaactatcacaacgggaaaatagcctgctttatgagtgactgttcaccgcactggggtacacagcagtttatgtcctggccgttctataccgcgttgtgggtaaatatactgactcatattgcaagataataataataatggggtaactccagttactccatttactataatagaaggattgatgtatgaaaaagaataagtactcaactcccttatggatgcttgccacgattcttgcgggtatgctctcccctatgcaatcagcggtgaatggtcaattaggtcactggttacaggatggtaatgcatgcgcagttatctcctttgccagtggtttagtcgtgatgttttttattattatggcgcgaaaagaaacccggcaacaatttgcggcaattccttctctgattaaaaaccgaaaagttcctctctggaactggtttgccggtctctgtggagcgatggtggtattttctgaaggcgcatcagccagcgcactcggggtcgcaacgtttcaaaccgcactgatctccgcgctattgctgtctggtttactttgcgatcgctttggtatcggtgtcgacgagaaaaaatactttaccccttatcgcatcatcggtgcattatttgcggttattgctacgatttttgttgtgtcacctcagtggcattctacctctttcatcttacttgccattcttccgttcttagctggtttgcttgcaggatggcagcccgctggaaatgcaaaagtagctgaagctacgggatccatgctggtttcaatcacctagaatttcatcgttggattttgtgttttaggcacagcgctagctattcgtgtcgcattagggcacgtcactgttcaattaccagatgtctggtggatgtatcttggcggcccgcttggactaatgtctatcggtttaatggccattttggtcagaggtctggggttactgatgctgggggttgcttcaacggcgggccagttactgggatcagtattgattgacgtattaattccatcgctgggcaatagcgtttatctggtcacgatcatcggaacactgtttgcactggtcggtgcaattgttaccactattccggaatacagaacctcgaaaacaatgaagaaaatggaggtataatcatgaaagattatctacaaactgtgacgggccccgtcgcccgtgaagatatggggctaacacttcctcatgaacatctgttcaacgatctttcctctgttgtggatgctccttgctatcctttttcacaacggcttgttgataaaaaagtcacggcagaaatccagtgggcattaaaacacgatccttattgctgcgctgataatatggaccgcaaacctattgaagatgtgatcttcgaaattaataactttatctcgctcggtggtcgcaccattgttgatgccacagggtctgagtctatcggacgagatgcgcaggcattacgagaagtcgcattaaaaacaggtctgaatattgttgcttcctccggtccctacctggaaaaatttgaaagccagagaattcataaaacggttgatgaactggcgacaacgatcgataaagaattgaatcaagggattggcgatacggatattcgtgccggaatgatcggtgaaataggtgtttcaccgacatttaccgaagccgagcataacagcttgcgggctgcctcgctggcacagattaacaatcctcatgtggcgatgaatattcacatgccgggctggcttcgtcgcggtgatgaagtactcgacattgtgttaggtgaaatgggcgtctcgccaaataaagtctctctcgcacactcggatccgtcaggaaaagacgtggcgtatcagcggaaaatgcttgataaaggtgtctggctggaattcgacatgattggcctagacattaccttcccgaaagagggaatagcgccaggggtgcaggagactgccgatgccgtcgctcatctcattgagttgggatacgccgatcagcttgttctcagccacgatgtcttccttaaacaaatgtgggctaaaaatggcggtaatggctggggatttgttccagatgtttttctggcctatctggcggagcgcggcgtcgataaaacgatcctcaaaaaactctgtatcgataatcccggacgattattgaccgcataaaaccattatcccccggcacattgcgccgggggatgtcaattaataccccgccgttaaatcatccaccaagcgcgagtcggatgcgccgtacaactcaccatccgacccaaccataatgctttgcgtgctgcccatcgcctcattcagcgccactttctgaccttttgcatccagcagcttgagcgtatccggactaaacccttttcaacacgcagctcgtccggcaaccactgatagtggaaacgaggcgcattggtcgcttcggcaacattcattccacaattgatgctgttcaccaccatttgcagcacggtagtgatgatccagctaccggtaacaaagtgagtacataaaggccatactgtcacgaacagtgcaaaagtggctcttccgcaacctgggtgaagattttcatgccagtggactcattaccctccgcctaagtagttcaagtccggctcgaccatacatctggcgtatcagcaccttcaggcgatttacatgaccttcgacaacaccagtactccagcgactgctgattgcctcacatatagccgcagcatcagcttccatccccgcagctacgcaccgaagttctgctgagccgctttcgtggacccgagtgaaccagctgcttagctgtgatttattttaggttttcagaatacggtagaactcgagtaccagttgctgcgctattttcaactccggttctttttcacacatcagactaataaatcggaaagcataattttcttcacccctgattattctccagggcatcaaccagcggcttacccgggacactgaaggaagtcttgcggcagtagtaaccggtgggatccagcctttacgccatttggcaacagcatccctgacgatggtttcactgcctgtaacccccctggccaccatttcccgccatatccggccggagttataattaccacattctcgttgctcttttaaccactccctccatgggtccagaagccctcgctttggaggcctagttgacatttcagggaatgttcctgaacccacccagcgactgactgtcactcgcgacaggcctgtaatacgggatatttccctgaaactacatcccttgttatgcagggccataacctctgtccaacgctgatgccgttttttgcggatgtgctgtttaaggcgttccagacgacggagcgatgctacaggcacagatatttctggctcaggtgatttcttcagtgataactctctgacaacaagacgtatcagaggcatatgtctgtacatcattcgttcaggctcatcaccaatattttttagcaggtgccatcgatcggccacctgtctggcctgaggtgcaccttcacgtgctgctgtcgcatagactccactgcgatcacgcgagacaacctgtatttccggatattttctgaaccaggtcgccagcgtacgctgatcacggccgggaagcaggacgaggggacggtgagtatcaagattgactattaacataccgcagcagtggccccgatgccacgcccactcatcaataccgacatgaggcgcgcctgactgtttcgtctccggggtattgataaccctgcgaagaagagtatcagcactgcaacggagacccgctgccgttgcagcccgttttccagcctcacctccagctattaatcccagttgacgttgtaaattttgtaacgcctgtgaagactgctggtgtgaaccggcgaagggagcaagcgactcggcaaaaattttacgtgaacaagccgggttacggcagtaccagtggcggacggaaatacaagccatagcgtctgccctgagcagggtagatgctgtatccggcgccgacgacaactatgaacagagtcgctacgcttaaagcattcaggacattgtgctgttttgcgttttccgtggagatggagggttataccgtcagagctaataatttgtcgactgcatcgccatccgcaaggtaactgtagaagtgtcttaagagagtgcattgcgttgcccataacttaaaacagcttagatccttgttcgccagaaagtttcatccattttcttccacccaggttgcggaagaaccacttttcatccgtcgttgacagatgtgaagtatgcgggagaaaaagtgaatatctaactgtaataactcagaccggtacgagtactcggaacgtctacaatcattcagggcaaagtgctaaaatttctctatcccgggatgcccctaccaacgcagcactcccggagatatcattacagctctgcaactgatttccgcgactgaaccgctcagttcctatccttccagttgccttcctgcagccccccctccctgctgtataccccggtaccacaacgcgggcagcacttttctccttcataatcttcgtcacacatcacacaaaaccactttctcaccttcaccgtataatccggaaccgtcataccctgcagatgcaaacgacgggcctctttctctgccgggtcaagccaggtgcatcgcagcaggattttctcagcgacagtcatctggtcatgttcaaaccacggtggttgtccgtcattgccccgctgaagtgttaacgggcatccacaggacacacagcacaaaacgtcctggcggttgtgcttcgctgcttctttcgccgtaacaaaatggcctttgctgtcattcgccatataacagttcagaattcgcatatttcctcctgagttgtccggggaatactgaatcctccggtctggcagtgtgtgcagtaccgctccccataataatcgtggtgacattgtctgcagtgccagctggctttacgcaccacgggtaaggcatccggtacgaattgctgcagacgtttaatcaactgtatttctctgcgctccggcctgacataagggcactgttgaccgtgctctgtcagcctgtcgtcagtgtgttcaaaccagggaagttcagtgtcgtattgcggatggtatctgagtgcactgccacacaagtggcaggtgtagttagcataaggtgcggcctgtgcagtacgggcgcccgtcagacgtccgttgccatcaagagcgataaaggattttgcgtacatagtcatattcctcagccgccagacgacacgcaggcaacagccgtcccggtacgggcagcgtggtcagggtgtgaatggcggttcagttaaaatctggactggagtttgggtaaagcaggctggttgctgttacagcactgtggttgtcacacaatggaacactgacgtaaaaaacagtcagtgggcgagtggatacatcgttgccgccagacaacaacccatacttttggtttgccggatattggcgcgccagtcgtgctcaactccggctacagccaaaattgcgctcaccggtgcagtgagctttggtatgttccttcgccagatagtcagcacgttccagcacctgctgaaagccagtgtcatcatcgcgttccagccacaccgccggccaggccggaaaatgcaccagcgtggcatggcacccgacatccactcccagggcactgcaccacgcctgtttaatcatcccggccagtgatcccggaacacggtaatcaccggcacgacaccaggtatcccggttaaccagcagcatcaggtgatagtgttttttacctttgcactccccaaactcccgggcccagacgtaatgcagggtggtgggatgcacgcgtttaccttcccgatgcttacgtttctggtaagcgtcgattcgggctttcagggcattgatgaagcgggatatcacagctgcgtccgttgctgccggtacatccgggaaacgcaggtcaacccgcaatgccgtcaggcggggatgaacattcagtgcgtgccgcaccgtctcacgaatacgttgctgccagaaggggttgtatttgtaggtcatggttaaatctccgtatggttcatacggaatagccacgtcgtaaaaaatgcgcagagtccctgaagtgacctccggcaggacactgtctcaggcactctgtgataacccgaacggtcgtctccggactgacggttgaattttcagcgttgtttttttaatgtaaaaaaccggttacgggtaaggctgtgaggagggagtgatggtgatacgcaaaaagaagtgcagggactgtggaaacgcgattactcataatacagtgtgttgcccgtattgtggttctgtcgaccccttcggctattaccggaatacagaccgtatcgttaccatactgctggcactgattattgtggtcctgctgactactgtcagcgtcagtgtgtatatactgtgtagctggtgagataacggttcatgtatccctgagctgacagtgtaccgggtatattaagcgtaaccgacaggttctccttcataccatattaaatttttccaggtattgccgctgccttatttcgtcccatacaggaaaactcgtctgggtttctgacaaatacgcgaaactcacagcccctcaatatcaaccacacgctgtaagccggtaatacctgaaaatcagcctattaccgcccgcgcctccgttaccgaacgctcaggtgaccagactgaagcccagcacgcactcgtaaaatttgcggtcagttccgtcagtcagtgggcaaccgcagagttacgggcttccaggtccacaggagtgagtctataacgcgtgtgggaaatcattttttctggcgttgacagaacgccttacgggctgctacttacccggtgtcccgcaatacagccttagtgttccgttatcggggatccggacgcaccgcaacaaccggggaagtatttctggttagagctgtgtcaagagggatttctcagcccctcactcaccggctcagtctcaggcagaagcattaatacactcagttcatgtcttatacaggaatgggcatagggggagctggcgtgtcactgctgattttacgcatcagcgttcatgtatctgcactctgatacagaatgcttcacagcgctctgttaccggagagatttactctcttaggttattctggcaaatcctttacgttactctctgatgacttcttatatttataataccaatcagacaaccttatcccatcggtgatatcagtctcctgctcgccaggaacgggctgactcactgtaaccaccwccgaaaacaactctgcaattatcagaacgcctgcttctctccctgtcctcacgaaaactatcccctctttatcgcgcgtgcgtgcggaagcatcttttcgcaacacccccctccgggattccgctacggctctgccatcgcaatccccccgtttatctccggacagccacattcccgattattttttacgtttctccccggttgttatgccggtgaaggtggcgcgctgttttcatgaccacaccggctggtttaacaacatccggaggaacattctcatggctaccccagtttcgctgatggatgaccagatggtcgacatggcgtttatcactcaactgaccggcctaaccgataagtggtttgacaaactcatcaaagatgggggctttcctgcgcccatcaaaatggggcgcagctcccgctggctgaaaagtgaagtggaagcctggctgcaggcgcgtattgcacagtcccgtccgtaatttttaaccactaacccttcgcccacagcagacgcaatctccggcctgccggcggcgctctgctgcctgttatcccccgtgaggaatatgaaaatgaaacaacagtatcagacccgttacgagctgctccatgaaaactaccagaaatggctgaccggcttcacccggcacgccgtatcatggggcgtgtgtcatccgaatatctactatttccataatctgacgcccgggtgggtgtcattcaatggcgaaaaaccggagattgccatcgttccccagagtctgcaccggctgatttatggtccggacaaacggagctccccgtccctggatgatgatctggtggtgaatttatgcaccagcgaacacctgctggttcatcatccgatgctggaagggatcctgctgtctgaatgtgagcgcctgaagcaacattctctggcaaacaaactgatcagcctcttccgtcagtttggcggcacggagttacgtctcaaactggtctggctctgctggcttgacttaatgaccggaaacagccttgacgactggacgaaaaacctgaaacacaaatcagaaaaagatctggagcaatggatcattgcacgtcagggtcagagtgaaccactgacaaatctgatggatcagtacgtgcttatggcataccgtacatcggttgatgccgctcacagttgatgtctgagaaccacagggctggcagcagaaaaccagccctgtggtaaaatacagtaatagcggcgtacatcaggcacgccgctcactcgtccacagatcatatacgtcattatactgcgcgataacggagggcttcagcacccggtcatttctgagcgggtatgaataccattgatgatgcgaagcagccacgggcagaaacgttcttcacaaccaggtgcctccatcttcactgcagtctgaatgtgccggcttgttatccaccagaaatggtatgctccggtacatgcataccccggagactataaacgcactgaatcatagcctcccacctcagcaggaggcagtcagctttcaggcggaaaaacgttgcagttaaagatcgtgagaatcgctgtttcgttgcatagcaacccgaacagttgtagtgaaacattttacctgcatcagcacatggtcaggcgccgtctgtatggcgtggaatactgatgtttcggctgatggcaagcctcattctctgtggaaacaggggcgcgcattagcttctcaaccagagagtgtcacaaagacaaatattgctgaaaatcgcattcatcgttcaggcgtgaatgcccggagacaaaagccgctgtccacacagtccccctctgacctgaacaaaaagcatacacacaacaggctcacctgaccccgaaaaaccataacttcagcaataccagtgacaccagcacgttacctcagtgccacatcttcagaccgcgatcaatctgaaatgtgactatcggggcaatatccctgctttgtggtacacgataaccagaaaacatcccctgaaccgccagccagaaagactggccacaaaaggggtaagctgaaatcgtttatggattacatcgacatatgcctggcagagaatggtaagcgtgcagtgagaaccgtattgacgaagtgaagctggtcaggcaggcagagtaacccgccacgggagcagagcacccacccggttcacaggccagtcggcgatgacatcaagtacatgatgcagatagcgttccggatccacgccgtttaatttgcacgtcccgataagactgtacagtgacgcaccgcgctcaccaccatgatccgagccgaagaacagccagttttttctccccagactgaccagtcgtagggcgttttcggcaatgttattatccacctccacccagccatcttctgcatagcgggtcagcgccggccactggttcagcgcatacccgaacgccttcaccagttctgagtgccttgagagggttttctgtttctcccgcagcccccctccagtgacgccagcagcggcagcactttttggtgccggactgcctgccgttcctctgctcttttacctctgagctccgactcgatggcatacagctcgccgatccgtttcagcgcctcctccgtcagggctgacggggtacggacgtgaacatcgtggatttttcggcgggcatgggcccagcacgtggcttcctttatatggccgtcgcggtagagctcgttgaacccggcgtaggcatcagcctgcagtacgccactgaagcctgcaagatgggtctgagggtggataccttttctgtccgggctgtaagcgaaccacactgcgggggccagcgctgatccggcgttgcggtcgtctcgaacgtacgtccataagcgcccggtcttcgtcttcttattgcccggcaacagcaccgggacaggcatatcgtcagcatggagtttgccgtcggtcaggacatagtgctgaagggcttcatccagcggtgccagcagacgacaacacgcatccacccagcccgacagtacagaacgactcaacactacaccctggcgggcatagatctccgactggcgatacagcggtatgtgctctgcatactttgaggtcagcactcgggccagcagccccggtccggcgatcccccgttcgatggggcgcgaaggagccggggcctgaacgatgcgatcgcaccgacggcaggcatgcttttcacggactgtccggataacccggaaggcgctgcgcatcagctccagctgttcggcggcatcctcacccaggtaactcagcgaaccaccgcactccgggcaacacggctcagtcggcagcagccgcttctcatcccgtgggagtgactcagggaacggtttgcgggtgcgggtctgacgcagcgggcgctgcactgccgggtcatccacccggccggtcagcgtatcgctttcctgctgcagcaggttcaggtcagcttccatttgcgcgatacggcgggataccttttcggaacgactgccgaagttcatccggcgcagcttatccagttgcgcctgcagatggtctatttcgcgttcccggttgctcagcttttcctgcagggcgtggatcaacgcttcctgttcggccaggcgctgtttcagcagaaggatgtcgtcagaagaggtgtcgttcataagcctgtattttaccaggcttattctgcgacaaccaggataaagagcgctacaacatggtcagggatgtcagtaaccgctttggctgtcgccagtcgataccttccatcagcatcgccagttgcgccggcgtcaggaacactttgccatcgcgggctgagggccaggcgaagcgaccacgttctagtcgctttgtcagcaggcacagaccatcgccggtggaccagagcagttttacctgactgccgctgcgtccccggaagatgaagacgtggccggacatcgggtcatctttcagcgcggtctgcacctttgcggcgaggccattgaagccgttgcgcatatcggtgataccggcaaccagccagatttttgtgcctgcgggaagatttatcatacaggcccccgcatcagttcgcgcaggacagtgctcatgagttcagcagagggatgagtcagtgttatttctcctccccgacattttatgtggcaggtagcgggaggagagcaggatggtagttcgaaggttgggagagaagagcccgcctgaagctgcacgggtatcagggcaggaagcgacgatgagttttttcggggccgacagacccgcccttcacgctgccagagccttatccatttaaagagcaggttatcattgacgtcatgtttccgggccagtgcggcaatactgccttcttcttcaagagccagcctgaccagttccattttgaattcaggggaatagtgtttccggggaagtctttctttagcgcgcatgaggtgtccacctgcaaaataagtgggtgcttaagttacaggatcctggattcgggaccagacggtactcagacgacgcttacagagaatgtccggaatgacgaggttatctttgcggagattaaggcaatggtatacgggccgacgttccatgccgcgttactacattcagcccggacgtaaaatgcgcccgtcaaaaagaacggttcgcttcgaaactcagccaggataccacctctccgccacacccgggaagaagttgatatggtggttgccggacaacagcgctcctggattgactgctgcatcactcaaccacgctgaatatcaaaggagagcgttaccggttaaaagagaaacgtaaagctgtggtgatgacccaaaacgcaacgcctgtcagtgaggatgaaatggtgaaaagcggacagcatcagtaacggaagtatcttagcgggtacgaaaatggcaggatcgtgacattgacagaatatctcctgatcatcctgaatgactgcagttgctgtagaaaagtaagctgtctccacccacggcaccacttaacaggcattccgtaacttcccccagacttactatgacgcattatcggtgcactgaaaacgggagagtgcgcttaaaaccgcagaccgcatgcgggtgttactgcatgacagtctggccgtattgtgagatgtcggcaggaaccgatgtccgcgcaggggggaacttcctgcagtacctgacgcttcaaatggtattaaccgtagggtgttgttggttccggatcgcggaaatgggagcacaggtctgctacggggtgtacctctgacagtatatccggctcgctcatctgacagcctctctcccggaaaagaccaaaaatgagatcgtctcctcaacagcagagaagaggtcttgacagacaggctatattgcatacgatttatgaagaaaaagacagcaaatatggaggttatagcggagaataccctacgaaattcctatgaaaaacgattgaaaaaaatatcaaattcgattcgtttttatatgctttttgggagcgtggcgatgacgaactgttgcatgtgcagaggagaatgcacccggaagcaccagaatcatccagaaaggcagaacgattacgcatcaaaccaggagacagcaatatcaaggtaatatactgatttaaaatgaatttacagcaatacgtgaaaacattttttacttaaaggagacagatgcgctgaagagagtgcaggtatttttatataaaaatgagaagtttacgggatgtatatccggcacactatgaccggagaatatcagtcaagcttaaaaagacaataaatacagtgagttaaatacacagagaaaacgtagtatcagagggtacatcttacaacagagactgaatttccggtttttcataaccggcgcattccggaaagtgcaggcggcccggaggttttctgacgccactacctggtagattgttctgtacatcatgtacggaggtttttgtttgcttttttaaaatctgcaaatgtgagaaaagcaggtgaggtgtattgtgggaaaggaactggatgatatctgcaccagctgtccgtatatcgatgctgtaaaacggcacaaacaacagctcggtgccatagaggaatatacacagtggttaaaaaaagaaccacgggcatcttatttttttctgttccagctgtatacccgcattcacaatacatttttctcccaaaagcaacaactcccgttcactcccggtggcactcactgcccggaacctgatgtcacccttcgggacttaacgctttcccctggctaccacagtgattatgcccctcaacccattccggagatggacagttctgctgttgttcccccaactaatgaaaacacctcgcctccggaagatactcccgacaacactccggccggaggcaataccggacaagcggaaaagaccagaaacgcaggactcacacccattcctgaaaaacgttcaggaatgcccccggaacatctgcggtttgccacggggtttccatcgcaaccgaagattgccggtcccagagaaaagccgatgcgcaccgtgcatccggataaaatctaccgtgaaattatatggttctgctccagttacctgctgaaatccggaccagaggctacgaggacgattatcaactcagtattctctgaatgggccagcataaacaatgattacccctcccccttttcgtgggtggacagcagggacagtgaacagtgtgactggttatggaacgccatgcaggtccggtgtgtgggaaccccgctgaatccccttaccccggagcagaaatactggtttgcctgcgccacgtttgataactgggagggctggaatgagcaacaggtacagtttttactggaaagtaatcccagacggaacagagcaaagtttacgcaggtctccttccaggcccccaggattcagcataaagcgattcttcttgatgagctgaaaagtgcccgggagcaacaaaaaaggcgtgatgaacgtgctgatggttccgtccctctgaaactgtccggaaaaatccacaaacagcttgaaagtattgcccgaagtcgtggtgtcctcccaaaaaaactgctgaatgaaatgattgagcaggcgtaccatgatttggtggcaaccaggcagaacagccaaatcgattccagataatttcagacagatattatttccgtgaatcccccgccacctttccggtgcgcggggttttgtcttttttcaccgggaatacatgtatgaatccgtctgatgccattgaggcaattgaaaaaccgctctcctccctgccttactcactttcccgtcacatcctggaacatctgcgcaaactcaccagtcacgaacccgtgattggcattatgggtaaaagcggggccggtaaatcctcactctgtaatgcactgtttcagggggaggtcaccccggtcagtgatgttcacgccggcccccgggaagtgcggcgcttccgtctgagtggccacggtcacagcatggttatcactgacctgcccggggtgggcgagagccgggacagggatgcagagtatgaagccctgtaccgtgacattctgcccgaactggacctggtgctgtggctgattaaagccgatgaccgtgccctgtctgtggatgagtatttctggcgacacatcctgcaccggggacatcagcgggtactgtttgtggtgatgcaggccgataaaacggagccctgccatgaatgggatatggccggtattcagccttctcccgcacaggcacagaacattcgcgaaaaaacggagcggtattccgtctgttccggcccgtacatcgggttgttgccgtatcggcccgcaccggctgggaactggatacgctggtcagtgcgctcatgacagcacttcccgaccatgccgccagtcccctgatgacccgcctgcaggacgagctgcgcacggagtctgtccggtctcaggcccgtgaacagtttaccggtgcggtggaccggatatttgacacggcggagagcgtctgcattgcctctgttgcacgcacggttctgcgcgccgtccgtgactcggtggtctctgttgcccgcgcggtatggaactggattttcttctgaacccggtggtgatgtaccaggctgttgttacagatttttaactccatgaaaacactatgcaaacgcagccatacccgggttgtccccttgcgttgtgtttctcaagttaatagaatacatcgatcgttactatcatatcgatcgttataaacgatcgtttgtagtaaatgacctcctccgtggttgtcatgaaaatgcgtcttaggaaggttaaataatgcacgaaaagaacatcgccctgctttgtgatgaagccgaccgacttttgcaactgaacattaatctgctccggcaaatggttgaggagccagatgtgttatctgacagtaagaacgaaaacagactgctttttgataaacagaaagcactgaaaagaattgaggagctggagggcgaacaaatcaaaaccgcgcgcagggagatggtgctggctgttgtcggcacgatgaaagcaggcaaatcaaccaccatcaacgccattgtggggcaggaaattctgcctaaccgtaaccgccccatgacctctgtaccgacgctcatccgccacgttcccggaaaaactgagccggttctccatctggaacatattcagcctgtccgcaatttattaatcacactgcaggaaaactcgccaccccggcaggacagcaagtcgcacagaccctgctgcaaaccggggatacccgtgaactgctggatattctgacggatgatggctggctcaaaaatgaataccacggggaggaggaaatctttaccggactggcatcgttaaacgatctggttcgtcttgctgcggcaatggggagtgactttccttttgatgaatacgcagaagtgcagaaactgccggtgatcgacgtggaattcagccatctggtggggatggatgcatgccagggaacactcacactgctggatacccccggccctaatgaagccggccagccgcagatggaagtgatgatgcgggatcaactgcagaaagcctctgcggttctggctgtgatggattacacccagatgaactcaaaagcggatgaagacgtccgtaaagagcttaatgccattgctgacgtatcagccggccgcctgtttgtactggtcaataaatttgatgagaaagaccgcaatggcgatggggcagatgccgtacgccagaaagttccggcaatgctgaacagcgatgtgctgcccgcctcccgcgtttatcccggatcctcacgccaggcatacctggctaaccgtgcgcttcatgagttacggaaaaacggaacccttcctgttgatgaagcctgggtcgatgattttrtcagaggwgcyttcggttgcatgaaaaaagaatacgtctgtaaagacagtgaactggcaactgaaggggcgacagacctgtgggaaggctcacttatcgatcaactgataacggaagtcatacagagctcacattccagagctgcggcactggcggttgattctgccgccgcaaaactgatgcagaatgcggaaaatgtcagcgaatatctgtcattacgccatcaggggctacagcaaagcattcagtcactgcaggcgcatatcaccagcctgcttgcggatatccgggaaatcgcggactgtcaggagcaggtgaccgctgatgtcagaatggccatggaggagatcgatgccagaacccgggaattactcacgggggtctgcacctcactggaagaggagctgaatgactatttcagaaccggtaaacgcaaagaacagcaaatgctggaggaagaagacgcagaacaacgaaggtcycagtccggattatgggggaaaatttctcaatggtccggtatcaacaaccagggccgggaggattacaggaaacgagattttgccccggacagccccgaaataaaattcagtgatcgcagggaagcccttgaactgatgacgcaaatcgaatcgaccgtgaccagcctgcaccgtgaggctgaagcacagttccggcctgagctggagaaaatcgtcagcgggattgaaacaggttttcgtggcacggccctgtacgccacagaaaacattgccggtcgcatcaatgcccgcctggaggatgagggctttaccgtaaaaatcagttttccggcagtcagccagttacagacccggctcgcggtaaaaataaatctgagtgcgcttatggaggaaagaacggagaccgtcacccgtcgccgtcggcagagtggcgtatggggaaccgtttgtcgatggtttggcaccagtgacctgggctgggaaaactatracgtggatgtgagccgcagtgttatcaatatcaacaaggtcaggaaggaagtgatgtcactgacccgggcatatttcggggagctgcaggcatccattgagcaggatattaaccagcccgtccgccaggaaatcgatgcctttttctgtacattcagggagaaagttgaacagctgcgtaacacgctgattcagagctctgaagatcataaacgcgatcagcaggcgcaggaacggctgaccgggcgwcttcaggcattaaatgaaagggttcctgagctcattactgacagtaaggcgctgagggaagagctggagacaatgctgtgacttcaccatttattcaacaaattgctgataaccgggtatgtcaggtactcacctgtcttcctgaaaaatttgtggttgatttcgcaaacggtatcgatgttgcacaggagcatatccgcacggccggagagcgcacgttcttccggcggttaaaagaggggctgagcggcgaaggtgctgcacggcagaatgccatcaatgcttcgcttgcacagggcgttgaggcatcccctgcgctggctgacggagatgacaacgtcacttgccaccacaaactacgcgattacccgggtaaacgacagggtcagttcactggtcagtgatacagccaggctggcgcattattccgcagatacgcgggagcagttactcaccctggccgatcaggttcaccataaactgaatcatcttgaagaaaaactccaccgtgttgaccaggttcagcgggcgcagttacatcttgagcagatattctcatggtggagcgccgggcgatatgcgtcattttcccctgccggacgttgttatgtggcacttgaagagcttcgctggggcgcgtttggtgatgtgatacgtcagagcgaaacaggccaggttaaccagctactggatattctcagacataaagcattaacgcagatggcacaggagagtggcggtagtgcaaccgtgcgtctgaacactctggactggcttggtggtcagggccgggagcaggcagataacgagtggcatgacgcgattaactggctgggagactggtgcagtgaagagcagcatccggtgatctggtcaaccacgcaggctgcagaacacttaccggttcgcatgcctcgcctctgctctgcagaacgcctctctgaaagtatggtcgatgaaatatttcagaagggggctgcatgagtacagaaatgaaaacggggctggtgctgtccggtggcggggcggtgggcgcttatcaggcgggagtggttaaggcactggcagagtgtggtacacagatcagcatggtttcaggggccagcattggcgcattcaatggtgccattatcgcggcctctcccgatctgtcagaagctgccgtacgcctggaggcgctctgggatcatctggggaataatcaggtgctgtcggtaaacagattggtttacttttcattgctgaaaaaattgttccaggcaatgaacctctgccagatccccggacgtgcaggagcactgcttacgacgcttcttcgccatatatcgacaatcaacgggtttgacaatctgatggctcagccgttgttgtcagatgagcccctgacagcgctgatggatcattatcttgatactgatgctctggcagacgggctaccgctgtatgtgtcgctgtaccccacagaagggggcatgcaggatattattgactgcattcgtgctgaactgggtgtcggaaccacgaaaaacgccgtttttcagcatatccagagcctgccccgcggacagcagaaagaggctctgcttgcgtcagccgcgctgcccctgctgttccgtccccgtgaggtacagggaaaaatgtacggtgatggtggtatgggcggatggcraaatatgcaggggraatacccctgtgacgccactggtggatgccggatgcaatatggtgattgtgtcgcatctgagtgacggttctttatgggatcgccgggcttttccggacaccacaatccttgagatccgtccccggaaaaggctgaaatatgcaggtgatggtggcaacagcggcggtctgctcagttttacatcggcacataccgacgcctggcgtcagcagggctatgaagacacgatgctgacgatggagcatatccggaaaccactggcggcacgtcaggcactgacccggtcagaggcggtattgcagaaaagcctggatataactgaaggtgcagattcggcactgagaaacgcgatggcccgacttaaataaagacgctccggagaaacgccaccgcctgtggtggtgtttttcctgtggtgttattgaaaatattttcagatatatattacctgagagaaagttttacccctcacctgtcaattcactcactggaaatttaattatgaaattacctgtaaagttattaatgagccttatatctctggtcagcgttattgcacgtgccggggaatataaaaattacagccgggatgaaataaaatactggcgatatacatcatacaaggggtggaaacttccggaaggtttcactgatgagaaattttccagcgccatttacaacggaagaatatttacaatgaaacgtttacataccctgatgttatttctggcggttctgttcacgggctttaactttaacgcagaagcggctaccgtaaaacaagctcttagttgtaacccagaagcctgggctgaacaacctggagtgtgtccatcaacgtacgagttgtacgaaggtgacgctacctacaaagctgctatcgacaaagcattaaaaccggtcggactgagtggtatgttcggtaaaggcgggtatatggatggccctggtggtggtatcacgccagtaaatattaacggtacagtctggctccagggtgacggttgcaaagccaatacctgcggttgggactttatcgtaacactctataacccaaaaacccatgaagtcgttggctaccgttactttggtttagatgacccggcctacctggtttggttcggcgaaattggcgtgcatgaattcgcgtatctggtgaaaaactacgtagctacggttaactaatttaaggagtctatcatgaaaacttttatcaaaactttactcgttgctgtaactgttctgttttctgtcttcgctactgcgaaacaagtaaaactgccaaataacatcaaatacgttaatactacagaagcgttttcctgtaccgaaattgacggtatgaattgccagacaaagaatcagttcaactataaagataacagctatgttttcgtgcttgaacgtggtggtgcctggtgctacgactacactgtctcggtagttaacctgaaaaccgggaaagcacaaatgattgaatacggggacaatcaactgtgctcaggtagcaacaaaccgttcttcgaaatcaaaaatggcgtaccgacggtaggagtcatcgacacatccggaaaacctgtcgttgtagcccaggacaaacttaaaatctaaggagtaaaccatgcgtttctctgcacattattaatatcaaaggtaaatacagccccagccattgttaccggaaagccgcttaatgcgtggctcgccagtgaaaggcctctcagacaataaaccttattcatttcaccagtcaggcccgtgtcttctccgggagacgcggcttttttcatttattgcaccagtaaatcttaaccaccgataaggagcaaagtatgcgattagtcagtcgttttggttatgctgcaaaccagatacgccgtgaccgtccgctgacacatgaagaactgatacgccatgtacccagtatttttggggaagaccggcacacctcccgcagtgaacggtatgcgtacattcccaccattaccgtcctggaaaatctgcagcgggaaggctttcagccgttcttcgcctgccagacccgtgtgcgcgacccgggccgccggggatacacaaaacacatgctgcgtctgcggcgggccggagagataaacggagaacatgtccctgaaattattctgctcaactctcatgacggtacctccagctaccagatgctgccgggttacttcaggttcgtctgccagaacgggtgcgtctgtggccagtctctgggggaagtgcgtgttccacaccggggaaatgtagtggagaaagttatcgaaggggcttacgaggtggtgggcgtgtttgaccggatagaggagaagcgtgatgccatgcagtcgctggtcctgccgccaccggcacgccaggcgctggcacaggcggcactgacttaccgttatggtgacgaacatcagcccgtcaccaccgccgacattctgacgccgcgacgccgggaggattacggtaaggacctgtggagcgcatatcagaccatccaggagaatatgctgaaaggcgggatttccggtcgcagtgcaaaaggaaaacgtatccatacccgggccattcacagcattgataccgacattaagctcaatcgcgcattgtgggtgatggcagaaacgatgctggagagcctgcgctgatgccgtttccctgagtgagggaatcattcagctttcgttcctgaaaaacacacatttatttgttatttaaggagttatctcatgaaaaccgtttctcagaatacccccacaatttattcagctacaacaccagagaataatccgcctcagttggttgccagcctcgtccctgatgaacagcgcatcagcttctggccgcagcattttggcctcattccacagtgggtgaccctggagccccgtgtcttcggctggatggaccgtctgtgcgaagactactgcggtggtatctggaatctgtacaccctgaacaacggcggggcatttatggcacccgaaccggatgacgatgatgacgaaacatgggtactgttcaatgccatgaacggtaaccgcgcagaaatgagcccggaagccgccggtattgccgcctgtctgatgacgtacagtcatcatgcctgtcgtacggagaattatgccatgacggtccattattaccggttgcgggattacgccctgcagcatccggaatgcagcgccattatgcgcatcatcgactgaatggagagaagcacaatgcaacaactttcctttctgcccggagagatgacgcccggcgagcgcagcctcattcaacgggccctgaaaaccctggaccgccatcttcatgaacccggcgtggccttcacctccacccgtgcagcacgggaatggctgattctgaacatggcgggactggagcgtgaagaattccgggtactgtatctgaataaccagaatcagctgattgccggtgaaaccctcttcaccggcaccatcaaccgcacggaagtccatccccgggaagtgattaaacgcgccctgtaccacaatgccgctgccgtggtactggcacacaatcacccgtccggtgaagtcacacccagtaaggcagaccggcttatcaccgaacgtctggtacaggcactgggcctggtggatatccgggtgccggaccatctgatagtcggtggcagccaggttttctcttttgccgaacatggtctgctttaacccgtcacaaccacatcacacctgttttcacttttatcttctgtcttcagaggtatcacactatgaaaatcatcacccgtggtgaagccatgcgtattcaccaacagcatcctgcatcccgtctttttccgttctgtaccggcaaataccgctggcacggcagtgctgaagcgtataccggtcgtgaagtgcaggatattcccggtgtgctggccgtgtttgcagaacgccgtaaggacagttttggtccgtatgtccggctgatgagcgtcaccctgaactgagtcagggmattctgatgagcagaattatcgccactaccggaccattcttagccgattttctgtaaggattttatcgtgtcagacacactccccgggacaacacttcccgacgacaatcacgaccgcccctggtgggggctgccctgcaccgtgacgccctgtttcggggcacgtctggtgcaggagggtaaccggttgcattaccttgccgaccgcgccggtatcagaggcctgttcagcgatgcagatgcgtaccacctggaccaggcctttccgctgctgatgaaacaactggaactcatgctcaccagcggtgaactgaatccccgccatcagcataccgtcacgctgtatgcaaaagggctgacctgcaaagccgataccctcagcagttgtggttacgtttatctggctgtttatccgacgcccgaaatgaaaaattaactctccagaatagccttctgctacggcctggtgttttcaccacgccacttttccatttttatatctgcatatcaggaaaatcttcagtatgaaaacattacctgtattacccgggcaggcggccagttctcgcccgtctcctgttgaaatctggcagatactgctgtcccgactgctggaccagcactatggcctcacactgaatgacacaccttttgccgatgaacgtgtgattgagcagcatattgaggcaggcatttcactgtgtgatgcggtgaactttctcgtggaaaaatacgcgctggtgcgtaccgaccagccgggattcagcgcctgtacccgctctcagttaataaacagcatcgatatcctccgggctcgcagggcgaccggcctgatgacccgcgacaattacagaacggtaaataacattaccctgggtaagtatccggaggcgaaatgatgacactggaagccgacagcgttaacgtacaggcgctggatatggggcacattgtcgttgacattgatggtgttaatatcactgaactgattaataaggccgctgaaaacggttattcactccgcgtggtggatgaccgtgactctaccgaaacaccggcaacttatgccagccctcaccagttgctgtaagacaatgcagtgatgcagggtatagtgccattaaccacagaaacagcactgttgtcctgtattaagcaggcaagagaagatgtccttaccctgcgccatctgcagcttctgcaccagaaccggtgaatctcactcaacaggcttcatttcccctgacgccagcctgaatacagctggcgttttcatttataaacagaaaggaaaaccgataataatggaatggacgccccgaccatgaagcaacggtaggatattactgataaaccttccagtggaggtgcgttatggccgttttaacgattagcattgacctgacaaaaaatgaattccaaatccacggtctgggtaggaacagaaaaatctaagctcagaaaacggattaaagtaagcgtcaacggagcaccgtattgacgcttatttattggtgagaactacgttccatggcaggagttcgtcaacacggttggagggccattccggcagtatgctcagaatatggcgcagatacgcttccggatcgataccgttcagacggcaggtgcctgcttttccggcaacaagcaggaatctcagtgctgaagcaggaattagaggtaaaaacgccctaccgggccatgaatcacccggtcattggagtagtaaccaaagcagatttagccagcatggaacaaatatctttggtgaaaagttggttacgggaagctggagcacacaacgtgttagtaaccagtgcagttaataacaatggagttacagaactttttgccttgctgcatacagaagaaggctgttgttaatttcgattggttctcagatgagaatgatgacggtgatacacagataagaatcaatgagcaatgagggttgccgggcaaccctcattgaataaaacgggaattacttcgcttcgccgtttttcatttcgcccatagctttcagctttttggagatatcgcggcgttctttggagagctcggcatttttgatgatgtaatcgtcaacgcgatcttcatagtcacctttcatgctggcgatgatgccctggattgcttcaacgctcatcccaggcttgatgtaatcgctcaggttgtccagcagcaggacgcgcttctggttgtcacggatctttttctcaacgtcctgaatttcacgttgcagtttgttcttacgacggaacagacgaacaaattccagtacgtcctggaatgaaggcttggtagtttccatttttatacccctgataatgtgagagtcggattcgtttaagcaaccgctattcgttagggccaacattactcatagctgccgcagatgacaatgcttttatcccttttcactatcataccctttatccttgctgaatcgaagcagcagcaagatgattctgaagttcaggaattatttgcgcaaggcccggcaaatcagattcgatagcaactcaagctgatgcgccgtttccatgttcagccacacataaccatagattggtgtttccactaccttcaggtcatggtggttattgagcaactgacgcagctcttccacagcatcgttcaatttttccgtattggcaaaaaccggctgcggattaccttcgtacagcgcatgaacaaggctcagcagtatttgctgcatcatgtgctgggtatcacgaagtttttgcgcgttcaataacacgaaatggctggggcgcgtggcccagtacgcattgatttgcaactccagcatacaaaccagattgcggttaatggtctggataccttcatatatcgattttggaatacgggtttctttgctggcgggcgcaatcagcccacgcattttcacggcatcggtcaggagtttttgtagatggctttccagacgtgggcgttcgagtaagttcggtgagaatgcagattgatagacccgattatactcggtcagacttttcgccagttgaatgcgccagtggatgaacgcccgttgtggccagataccggtaaacaacattgccagtaaagagccgaggatcacatcgccgcttcgccataacgccgtattaatttcacctgtcggggaaccaacaacaattgccagcgtcaccccaatcaataaaccttgatacggtttcttgcccagcgccagccaaccgcaaagaaacatagccgccgcgcaccagactaacatcagcggtaacgagattaactccagttgcagagcgataagacctaaaatcgaccccaacaccgtaccgccaatacgttcgaatgcgcgagggacaacgttcccccagaacgagattggccccataatcaccaccatggtgaccagcggccaggtgctttccgggatagtaaacaggcggataatgagaaaagtgagcaggaatgccagcgcgacccgagtaccatgcacaatgcggtaatggcggtatacccggatttcaaacgggcttaatgacttatcggcacgcacgcagaaactccgtaatgaagattaaaagcgctcataactcatctgtcgaccagaaggcgcgcctctgaattatccgacggacaaaccgggaacagtgtaatttcccggcaggagcgaaaaaattgaaaggcgcatcttactcttttcgctttcaaaaaaagagtggtcttcgcgtcaacacaccgccctgagatgaattagtgatgttttggctgcaccgcaacatacatttcgatatcccagtacccatcttccgcgccattgttcaagtaaacctcgaagcagggctttggtaacatttcataagcactgtcctgcaagaggctattaaagaactgataccagggtttagcaaaatcatcaccgactacacgagccaccgccaccgcatattgaccacctgaaatttctgtcagaatgacgccctcactgttttcggggagcgtaaagttattcggtaccgtcacgacggtgtcgcagcgtaatttttcggcgggtgtttcatccggattgtcgtaatagacagcaacccactccttcggcacaatatttttgctatctacccacatcatcaactgctcaaaacctttctttaccgtctgttcccacgggccaacgagatggaaacctgcaacggtacgtttatcttcctgcttaatctcgtagttcatgacgcctccattaacactgtttttatatacagtatagttgcaatattaaaaccacaaggaatgagtgttgattatgcgagcagactcgcactcctgccagtctgctgcaaaagaaaggtcaggccttatggtggaaataatcactcaggcgggaaaacatgccgccttccccgacagattccagggtaaccagcggccagtgcgccacctgtttatcacggtcgtaaagttcaatttcccctacccgctgatgggcgctaattggcgcggtgagctctttaccatcaagggtatatttggctttgatatgtggaatttcggctttcggtagcaccatccagaactcttgttccgttcccaggtcgatattttctttatcgccataccagatgcgttccgttccgacctttttcccacggtgcaaaatttgcaccgtagtaaagttttgttgcccccaacgcagtaattttcttgcctcttcctcacgaccttttgcactgtcagcccccattaccactgcaatgagacgacgctgcccatctacagccgaagcaatgagattaaacccggcaccagaagtatgacccgttttcaggccgtcaacattcatggttttatcccacaacaacccgttacggttttgctgggtgataccgttccaggtgagacttttctcactgtacatatgataaaactcgggctcgccgtggatgatagcgcgagaaagcacagctaaatcataagccgagctatgctggccaggtgcatccagaccatgcactgtttcaaaatgcgtatccttgagatgcagcttctcggcatagttgttcatcatttcaacaaactgccgttgcccaccggcaatatagtcagccagagcaacacaagcgtcatttccggaatccacaattaaaccacggcttaaatcacgtaccgatacgcgatcgccctctttcaaaaacatcagtgaagaaccgacaaacaccggattatctttcgcccacgcatcgcgccccacggtgacaatatcgtctggcgtaatgcgatgactatcgatagcgcgatccacgacataacccgtcatcagctttgtcaggctggcgggattgcgctgttgatgctcattaaccgcggtgaggatctgaccggtggtgtaatccatcaatacccaggacccggcatgaatctctggaggctgaggtgaaaaaggaatgttttccgccgcaaaaccagacgataagttaaaaacgaacaaagaagcagcaataataagacggcgtttcaacagcaaaccctcaggagtttcaaatagctgttctttttacggaaatacttatgaactggctggaataaagtgcaagaaaatgtgactaccctctcatttttatctgacatgatctgttgccactcgctgccaaattgtggcgctaaagctgattagcacggtgatatttgatactctggcagacagcagaaataacggatttaacctaatgatgaatgacggtaagcaacaatctacctttttgtttcacgattacgaaacctttggaacgcaccccgcgttagatcgccctgcacagttcgcagccattcgcactgataacgaattcaatgtcatcggcgaacccgaagtcttttactgcaagcccgcggatgactatttaccccagcctggagcagtattaattaccggtattaccccgcaggaagcacgggcgaaaggagaaaacgaagccacgtttgccgcccgtattcactcgctttttaccgtaccgaagacctgtattctgggctacaacaatgtgcgtttcgacgacgaagtcacacgcaacgttttttatcgtaatttctacgatccttacgcctggagctggcagcatgataactcgcgctgggatttactggatgttatgcgtgcctgttatgccctgcgcccggaaggaataaactggcctgaaaatgatgacggtctaccgagctttcgccttgagcatttaaccaaagcgaatggtattgaacatagcaacgcccacgatgcgatggctgatgtgtacgccactattgcgatggcgaaactggtaaaaacgcgtcagccacgtctgtttgattatctctttacccatcgtaataaacacaaactgatggcgttgattgatgttccgcagatgaaacccctggttcacgtttccggaatgtttggggcatggcgtggcaataccagctgggtggcaccgctggcgtggcatcctgaaaatcgcaatgccgtaattatggtggatttggcaggagacatttcgccattactggagctggatagcgacacattgcgcgagcgtttatataccgcaaaagccgatcttggcgataacgccgccgttccggttaagctggtgcacatcaataaatgtccggtactggcccaggcgaatacgctacgcccggaagatgccgaccgactgggaattaatcgtcagcattgcctcgataacctaaaaattctgcgtgaaaatccgcaagtgcgtgaaaaagtggtggcgatattcgcggaagccgaaccgtttacgccttcagataacgtggatgcacagctttataacggctttttcagtgacgccgatcgtgcagcaatgaaaattgtgctggaaaccgagccgcgtaatttaccggcactggatatcacttttgttgataaacgaattgaaaaactgttgttcaattatcgggcgcgcaacttcccggggacgctggattatgccgagcagcaacgctggcttgagcaccgccgccaggtcttcacgccagagtttttgcagggctacgctgatgaattgcagatgctggcacaacagtatgccgatgacaaagagaaagtggcgctgttaaaagcgctttggcagtacgcggaagagatcgtctaatttgaagcctccgccgctggtacggcggaggacaatgttgagtcaggctttttgaacggtgatgctccacgctgcatcgccaatctgctgataatcggtgatggcatgtccttcttctgccgcccactgtgggattgcttcagttgcctgggtgcaatcaaactcaattaccaactcatcgccgctggccatttctgccagtgctgcttttgcttctatgagtggaaacggacagacctgcgtcaccacatccagctttttaatcgccatctttacaccttacttaatttgccgcagcagttgccagtcgcgccttacgctgcggtcgaacatacacaagccaggacgcagtccagactccgagaatcataaatacaaggccaatccagccctgccaggtcatcattgcagtcatgaccagtccattaccgatagagcaaccacctgcaatgctggcaccgaagcccatcagtacaccacctaacccgctacgtaatgttgtttgtgcatcagcagcgcgaacgcggaactcacggctcgctttggcggcaataaatgaccccacgaagatccctaacaccaggaaaacgccccagttaatgtatttcacgtcacccgcgaccagaaattgcagaatattggccgttggggaagtgatgcctaacccaaacatacgtccggttgcttcactcaggggccaggctaaaagcgcaatcaaaccgatgagtacagctgtgacaaagggatgccagcgtttttcaaacagaatatgagcgatcccggttcggcgcggcggtaaggtcgcgactttgagttttggcttcttcaactctttcatcaccacccagagcgttatcaccagcaaaacggcaaccaacggccacacagacaaattaaaagtatcagcaatagagttatgttcagtagtgtagtgctgcaaggtttgatttaaaccactggcgtgtggagaacgcatcaccgcactcatcaccatataagtgaaaagcgcgatccaactgccgatcaatccctcacccgcgcgataccaggtcccggtggcacatccacccgccagaacaattcccagcccgaaaagatacccacctataacagtaccaagccacgggaacgccccggcttcgtaagtcagtaggcccgcctgaattaacgcaaaaacccccacgctttgtaccgaaattgcaatcagcaaggcgtaaaacatgcgattatttttcgcgatatacatatcgcgaaaaccacctgtcaggcaaaaacgcccacgctgcatgacaaatcccagcagagcaccacaaattagcccgcttaatatcattgaaaacataaattaattaaccagatgaatgttaatgaggaaattattcatgactggtggaatgcagaccaataaccaaattctctaaattagaacaaatggttattaatgaggatttcgataaaaaagaataaaaaaaccggagccaaatattcattcgactccggttgattattagaaaagatgattatgctacgtcttcgtactgcggaaccgggttacggaagctcttggtgacgcaagccaggtaaatcagaccgatagcagcccagatcagacccagaaccattgagctttcttccaggttaacccacagcgcaccaacggtcagcgcaccacacatcggcaggaacagatactggaagtgatctttcagcgtcttgttacgcttctcacggatccagaactgcgagatgaccgacaggttaacgaaggtgaacgccaccaacgcaccaaagttgatcagcgccgtagccattaccaggtcgaagttgattgccagcagggcaatcgcgccaaccaggatgatgttcattgccggagtacgccatttcgggtgaacataaccgaagaagcttttcgggaatacgccgtcacgacccattacgtacatcagtcgcgcaacgcctgcgtgcgccgccataccagacgccagtacggtaatggtggagaagatcagcgcaccaacctggaatgctttacctgcaacatacagcatgatttcaggctgtgacgcatccggatctttaaagcgagagatatccgggaagtacagctgcaggaagtaagttgcaaagatgaagatcatgccgccaatcagcgcggtcaggaaaatcgcacgcgggatcacgcgctctgcatctttggtttcttccgacaggttgctgatgccgtcaaagccggtaaaggagaagcacaggattgtcgccccggtaatcatcgggataacatgcgcatcgccagaccagaacggacgagtgctcgccagcgtaccagcgccttcaccttcaaatacgccataaacaaccatgcccagaatcaccgcgatcagcactacctgcaacacgacgattacagtgttgaagttcgctacggatttcagactacgcaggttaaaggcggtcataaaggccaccagcgccaccacaaacatccacgatgggatggaaggcaccagagcttcaaaatagattttcgccagcagaatgttgatcatcggcgcgaacagatagtcgagcagagaagaccaacccaccataaagccgacagtcgggctaatggatttctgggcgtaagtgtatgcagagccagcagaaggatagcggcgaaccagcttcccgtagctcagagccgtaaacaggatcgcaatcaatgcgaacgcataggctgtcggcacatgaccatccgtgaggcctgaaacgataccaaaagtatcaaacagcgtcatcggctgcatataggcaagacccatcattacaaccggaactaacgtaagcgttttacgcaattccacgcgagaggtgtttggagtaacgttatgcgacatggtcattctcctttacggtgataaccgtcgcgtaagcaaaaattgccccatttttttggattcctcagcgacaacaactgtcgatttttagtaaatatctatccggtacgaagcccggcctcttggtatgaatgattggtttgaagcaaaaaataaccgacgctgatgaaacgtcggtttttagtcattttttgacagcggcgcattgtgcctaaatgggggggaaatgacaagagaatgagaggcttgtcataataatttttctttaaatggctgattttccgtcatcagattttgcataaacaccggcgatcgcactatttgctaaaatttcatcccgccaccagccgctggcaagccctgcggtctgttcattccagccaatccagacgggttcaaagagagtttgggcgaccactttcttctcgattaacgcgccactatcgagaaaccgttgcgccagataacggggtaaatagccgcagccgaggccgctaatttgcagctccagcttggttttaaaatcgaaaacggtaatggcttcttgttcgtcgagaagttgtgaggccgtagaagcgcctgcctgcgcagtgtcccccaccacaatcgcccgatatcgtttaatgatacgacggtttaacggttcttcttcctgggctaacggatgatgaggcgcgaccgcaaagacttgttccagatcgcccaaccgcgagaaaccaaactcactggaagatggtggctcatgcatcgcgccaacaataatatccgctcgcccctgagtcagggcatcccaggaaccaccgagtacgccattgataaacttcaggcgcgtcacgctatgatgttgataaaaagcttcaatcagtggcgcaagcagagaaaaaggaaacgtgtcgtccacgccaatcaccagctcgttttcccagccttcatgcagtttgatcgcctgcttttccagttcccgcacggtatgcagaacttcccgccctttctctaataacatttttccggtgcgggtgaatttagcgcggtgaccgctacgatcaagcaattgaatattaaggtcgctttccagcttgtgaacggtgtaactcagagcggacggcgtcttgtagagtttggccgacgccgccgcaaaactgccttctttttctaaggcatcgaggatcatcaacacatccagcagtggtttcatacacgcccccttgcagtgcatgcggcgtcctgctggcgtgatcgtttactccagcggcattaccagcggatcgggatactggtattcaaatcccagttcattacaaatccgactgccatcaataatcttaccttttccgctgtccagactatttctgaactgcggaggttccagccccagtaaacgggccatctgcggatagaaaacattacgcgcagggtgagctggcgcacatatattatagatgtgtccgcctttaggtgcctgtaacaacagggtgatagcgccaataacatcttctaaatggactaaattaacaccatgttcaccatcaggcgcggtttttccggcaaagaagcgtccgggatgacgccccggtccgaccaggcccgcaagacgcagaatatcgaccgaagtaccgggtaaattgtgcagccagtcttcgagttcttctaatactcgtccactgttggttaccggattacgcggggtagtttctttcaccgtgccttgcgcgtcgccatagacagatgttgagctggtaaaaataatgcggggaatacgatgggccagcgcgctatccactaactcttgtaccgcttgtaaatagaactcatcgccggggccgctacgacgtgccggaagcgtaatgaccagcgcatcgacatccatcagggcatccagatcgtcagaatcgcaaactaactcaggctccatgcgaagcagatagctatcaatgccactcattcgggccgcttcgacaccatcttgtgtggttttactcccggtgacttgccagcctcgcgctgaaagtgacatcgccagcggcatgcctaaccaccctaacccgacaattgcgacctttttcatccgttatctcctgatacaccttagatctataaggctacgctagcgtatcaaaactgacaattcattctatgaatgaatctgttcaataatgataacgacatgctgcaatgagcagtgaatcgtcggtaaccgcgtataccagacggtgctcctctgtaatgcgtcgggaccagaaacctgacaaattatgtttcaggggttctggcttccccttaccttcaaatggcgttctgcgggtatctttgataagttcattgatctttttaacaattcgcttatctgtttcctgccagtacagataatcgtcccatgattcctcagaccagattagtttcactcaatgatgtccttttccgttcctttgcctgatttcaggctatcgattgagtccatcaatctccgggcgttagcgggggaacgcagtagataagccgtctcttccagggagttatattcttcgagtgacatcagaacacaagcctctccattctgacgagtaataaggatcggggcatgatcttcaacggctttcatcattgttgccgacaaattctgacgcgcttcgctgtagctaattgtacgcatgtcaatctcctcttttgtacagttcattgtacaatgatgggcgttaattaactatttattaattagtttgtagatcaagatattgtcagtgagacgaaaaatccaggcttcgctattttgggtaccgtcagcttagaagacagtcctcttagcgccctcctttccccgctcattcattaaacaaatccatcgccataaaatatataaaaaagcccttgctttctaacgtgaaagtggtttaggttaaaagacatcagttgaataaacattcacagagacttttatgacacgcgttcaatttaaacaccaccatcatcaccatcatcctgactagtctttcaggcgatgtgtgctggaagacattcagatcttccagtggtgcatgaacgcatgagaaagcccccggaagatcaccttccgggggcttttttattgcgcggttgataacggttcagacaggtttaaagaggaataacaaaatgacagacaacactcgtttacgcatagctatgcagaaatccggccgtttaagtgatgactcacgtgaattgctggcgcgctgtggcattaaaatcaatcttcacacccagcgcctgatcgcgatggcagaaaacatgccgattgatattctgcgcgtgcgtgacgacgacattcccggtctggtaatggacggcgtggtagatcttgggattatcggcgaaaacgtgctggaagaagagctgcttaaccgccgcgcccagggtgaagatccgcgctactttaccttgcgtcgtctggatttcggcggctgccgcctttcgctggcaacgccggttgatgaagcctgggacggcccgctctccttaaacggtaaacgtatcgccacctcttatcctcacctgctcaagcgttatctcgaccagaaaggcatctcttttaaatcctgcttactgaacggttctgtcgaagttgccccgcgtgccggactggcggatgcgatttgcgatctggtttccaccggtgccacgctggaagctaacggcctgcgcgaagtcgaagttatctaccgctcgaaagcctgcctgatccagcgcgatggcgaaatggaagaatccaaacagcaactgatcgacaaactgctgacccgtattcagggtgtgatccaggcacgcgaatcaaaatacatcatgatgcacgcaccgaccgaacgtctggatgaagtcatcgccctgctgccaggcgccgaacgcccaactattctgccgctggcaggtgatcaacagcgtgtagcgatgcacatggtcagtagcgaaaccctgttctgggaaacgatggaaaaactgaaagcgctgggtgccagttcaatcctggtcctgccgattgagaagatgatggagtgatcgccatgagctttaacacaatcattgactggaatagctgtactgcggagcaacaacgccagctgttaatgcgcccggcgatctccgcttctgaaagcattacccgcaccgttaacgatattctcgataacgtgaaaacgcgtggcgatgaggccctgcgggaatacagcgcgaagtttgataaaaccacggttaccgcgctgaaggtgtctgctgaggagatcgccgccgccagcgaacgcctgagcgacgagctaaaacaggcgatggcggtggcagtaaagaatattgaaaccttccacactgcgcaaaaactgccgccagtagatgtagaaactcagccaggcgtacgttgtcagcaagtcacgcgcccggtggcttcggtaggtttgtatattcctggcggctccgccccgctcttctcaacggtattaatgctggcaactccggcgcgtattgcgggctgtaaaaaagtggtgctgtgctcaccgccgccgattgccgatgagatcctttatgcggcgcagctgtgcggtgtgcaggacgtgtttaacgtcggcggcgcacaggccattgccgcactggcgtttggtacggaatctgtgccgaaagtggacaaaatcttcgggccgggtaacgcctttgtcaccgaagcgaaacgtcaggtgagccagcgtctggacggtgcggctatcgatatgcccgcaggcccgtcggaagtgttggtcattgccgacagtggcgcaacgccggatttcgtggcttctgatttgctttcccaggctgaacacggcccggactcacaggtgattttactgacgcccgatgctgatatggcgcatcaagttgccgaggccgtcgaacgccagttggcagaactgccgcgtgccgaaaccgcccgtcaggcacttagcgccagccgccagatcgtgactaaagatttagcgcagtgcgtagagatctccaaccagtacggcccggagcacctgatcattcagacccgcaacgcccgtgaactggtcgatagcattaccagtgccggttcggtatttcttggtgactggtcaccggaatcggcaggtgattacgcctccggcaccaaccacgttctaccgacttacggttacaccgccacctgttccagcctcgggctggcagatttccagaagcgcatgaccgtgcaggaactgtcgaaagaaggcttttctgcgctggcttcgaccatagaaacactggccgccgccgagcgcctgaccgcccataaaaatgccgttactttgcgtgttaacgcccttaaggagcaagcatgagcaccgtgactattaccgatttagcgcgtgaaaacgtccgcaacctgacgccgtatcagtcggcgcgtcgtctgggcggtaatggcgacgtctggctgaacgccaacgaatatcccacagccgtggagtttcagcttactcagcaaacgctcaaccgctacccggaatgtcagccgaaagcagtgattgaaaattacgcgcaatatgcaggcgtaaaaccggaacaggtgctggtcagccgtggcgcggacgaaggtattgaactactgattcgcgctttttgcgaaccgggtaaagacgccatcctctactgcccgccaacgtacggcatgtacagcgtcagcgctgaaaccattggcgtcgagtgccgcacagtgccgacgctggaaaactggcaactggacttacagggcatttccgacaagctggacggcgtaaaagtggtctatgtttgcagccccaacaacccgaccgggcaactgatcaacccgcaggattttcgcaccctgctggagttaacgcgcggtaaggcgattgtggttgccgatgaagcctatatagagttttgtccacaggcatcgctggctggctggctggcggaatatccgcacctggctattttgcgcacactgtcgaaagcttttgctctggcggggcttcgttgcggatttacgctggcaaacgaagaggtcatcaacctgttaatgaaagtgatcgccccctacccgctctcgacgccggttgccgacattgcggcccaggcgttaagcccgcaggggatcgtcgccatgcgtgagcgggtggcgcaaattattgcagaacgcgaatacctgattgccgcactgaaagagatcccctgcgtagagcaggttttcgactccgaaaccaactacattctggcgcgctttaaagcctccagtgcagtgtttaaatctttgtgggatcagggcattatcttacgtgatcagaataaacaaccctctttaagcggctgcctgcgaattaccgtcggaacccgtgaagaaagccagcgcgtcattgacgccttacgtgcggagcaagtttgatgagtcagaagtatctttttatcgatcgcgatggaaccctgattagcgaaccgccgagtgattttcaggtggaccgttttgacaaactcgcctttgaaccgggcgtgatcccggaactgctgaagctgcaaaaagcgggctacaagctggtgatgatcactaatcaggatggtctgggaacacaaagtttcccgcaggcggattttgatggcccgcacaacctgatgatgcagatcttcacctcgcaaggcgtgcagtttgatgaagtgctgatttgtccgcacctgcccgccgatgagtgcgactgccgtaagccgaaagtaaaactggtagagcgttatctggctgagcaagcgatggatcgtgccaacagttatgtgattggcgatcgcgcgaccgacattcaactggcggaaaacatgggtattaatggtttacgctacgaccgcgaaatcctgagctggccgatgattggcgagcaactcactaaacgagaccgttacgcccatgtagtgcgcaacaccaaagagacgcaaattgacgtccaggtgtggctggatcgcgaaggtggcagcaagattaataccggcgttggcttctttgatcacatgctggatcagatcgccacccacggcggtttccgtatggaaatcaacgtcaaaggcgacctctatatcgacgatcaccacaccgtcgaagataccggcctggcgctgggcgaagcgctaaaaatcgcccttggcgacaaacgcggtatttgccgctttggttttgtgctaccgatggacgaatgccttgcccgctgcgcgctggatatctctggtcgcccgcacctggaatataaagccgagtttacctaccagcgcgtgggcgatctcagcaccgaaatgatcgagcacttcttccgttcgctctcatacaccatgggcgtgacgctacacctgaaaaccaaaggtaaaaacgatcaccaccgtgtagagagcctgttcaaagcctttggtcgcaccctgcgccaggccatccgcgtggaaggcgacaccctgccctcgtcgaaaggagtgctgtaatgaacgtggtgatccttgataccggctgcgccaatctgaactcggtgaagtcagccattgcgcgccacggttatgaaccaaaagtcagccgtgacccggacgtcgtgttgctggccgataaactatttttacccggcgttggcactgcgcaagcagcgatggatcaggtgcgtgagcgcgagctgtttgatctcatcaaagcctgtacccaaccggtactgggcatctgcttagggatgcaactgctgggtcggcgcagcgaagagagcaacggcgtcgacttgctgggcatcattgacgaagacgtgccgaaaatgaccgactttggtctgccgctgccgcatatgggctggaatcgcgtttacccgcaggcaggcaaccgcctgtttcaggggattgaagacggcgcgtacttttactttgttcacagctacgcaatgccagtcaatccgtggaccatcgcccagtgtaattacggcgaaccgttcaccgcggcggtacaaaaagataacttctacggcgtgcagttccacccggagcgttctggtgccgctggcgctaagttgctgaaaaacttcctggagatgtgatgattattccggcattagatttaatcgacggcaccgtggtgcgtctccatcagggcgattacggcaaacaacgcgattacggtaacgacccgctgccgcgcttacaggattacgccgcgcagggtgccgaagtgctgcatctggtggatctgaccggggcaaaagatccggctaaacgtcaaatcccgctgattaaaaccctggtggcgggcgttaacgtgccggtgcaggttggcggcggtgtgcgtagcgaagaagacgtggcggcgttactggaagcgggcgttgcgcgcgtggtggtcggctccaccgcggtgaaatcaccagaaatggtgaaaggctggtttgaacgtttcggtaccgatgccttagtgctggcgctggatgtccgtattgacgagcaaggcaacaagcaggtggcagtcagcggctggcaagagaactcgggcgtttcactggaacaactggtggaaacctatctgcccgtcggcctgaaacatgtgctgtgtaccgatatctcgcgcgacggcacactggcaggttctaacgtctctttatatgaagaagtgtgcgccagatatccgcaggtggcatttcagtcatccggcggcattggcgacattgatgatgtggcggccctgcgtggtactggcgtgcgcggcgtaatagttggtcgggcattactggaaggtaaattcaccgtgaaggaggccatcgcatgctggcaaaacgtataattccgtgtctcgacgttcgtgatggtcaggtggtgaaaggcgtacagtttcgcaaccatgaaatcattggcgatatcgtgccgctggcaaaacgctacgctgaagaaggtgcagacgaactggtgttctacgatatcaccgcttccagcgatggccgtgtggtagataaaagctgggtatctcgcgtggcggaagtgatcgacattccgttttgtgtggcgggtgggattaaatctctggaagatgccgcgaaaattctttcctttggcgcggataaaatttccataaactcccctgcgctggcggacccgacgttaattactcgcctggccgatcgctttggcgtgcagtgtattgtagtcggtattgatacctggtacgacggcgaaaccggtaaatatcatgtgaatcaatataccggcgatgaaagccgcacccgcgtcactcagtgggaaacactcgactgggtacaggaagtgcaaaaacgcggtgccggagaaatcgtcctcaacatgatgaatcaggacggcgtgcgtaacggttacgacctcgaacaactgaaaaaagtgcgtgaagtttgccacgtcccgctaattgcctccggtggcgcgggcaccatggaacacttcctcgaagccttccgcgatgccgacgttgacggcgcgctggctgcttccgtattccacaaacaaataatcaatattggtgaattaaaagcgtacctggcaacacagggcgtggagatcaggatatgttaacagaacaacaacgtcgcgaactggactgggaaaaaaccgacggactgatgccggtgattgtgcaacacgcggtatccggcgaagtgttaatgctgggctatatgaacccggaagccttagacaaaaccatcgaaagcggcaaagtcaccttcttctcgcgcactaaacagcgactgtggaccaaaggcgaaacgtcgggcaatttcctcaacgtagtaaatattgcgccggactgcgacaacgacacgctactggtactggcgaatcctatcggaccaacctgccacaaaggcaccagcagctgcttcggcgacaccgctcaccaatggatgttcctgtatcaactggaacaactgctcgccgaacgcaaatctgccgacccggaaacctcctacaccgccaaactgtatgccagcggcaccaagcgcattgcgcaaaaagtaggcgaagaaggcgtggaaaccgcactggcagcaacggtacatgaccgctttgagctgaccaacgaggcatctgacttgatgtatcacctgctggtgctgttgcaggatcaggatctggacttaacgacggtgattgagaacctgcgtaaacggcatcagtgagttgcggggtaagcggatgcgatgttgttgtcgcatccggcaaaaaaaacgggcaaggtgtcaccaccctgcccgttttctttaaagctgcaaagattatttcgcgttgtaattacgcagagcattacgccccagcacaatccccgcgccaaccatgccacccagcagcaccgccagaatcaaggtgattgcctttttcggactatcgcgacgaataggtaacgtcggtttcatcacatagcggtaagcatgaatatcaagatcatcaacctttaagttttcaatatccaacaggttttgacgagtctgatagtagtttggcgagaacaccaacggacgggtcgcctcgtgcttaatcatcgactccagcgcttcgctccccaaaaggaacaacgtatcttgcgtcacatcttcagtctgctgaacctgtggctttgtcacctgcgcctgattcgcatactgcaacgcttcctgaatctgacggatacgcagatctttctgctcctgcgcaaccacttcctgggtcttcagagaatcctgcaagtttttcatttgcagcgcgatgttgtctttcaggtctttttccagttcttcatttacctggtcgtcaacttgctggatatacttcgccagctgcttctgcgcaccttcaggtgtttcaccaacataagacaccgccaatggtaacgactggtttttaacggtaggctcaatggtcagcttttctgcttcttcctggttatccagcgtttccgctaatgctgagaatgcagtactgtaacgtccgataagtgaagcctgaatgtcggagactttcggtacagccggaccgtaaatcacattcatcgcgttggtataaccagcgatttgccccacatcaggttgagtaacgatagctgtggaagtccacttttctttggcaacggccagataccctatagccaaggcaatagccacaatgacagagatgataattgtcatcttgccgcgccacaactgcaccagtaaatcaatcaaatcaatctgttccgggtcatggttttgcccagaaacattattattttctactctcatcattaccctaacggacgaaataattttaagtcgccatagtttagcgataatcgccatgaatgctataggataaatgataaaaataatgaattattacaaagggaacataagagaatcagggcgaaaatcgccctgataacaggatgttagtcactgccaaagagatcgcgggtgtagactttgtctgccacatccttaagctcttctgccatacggttggaaataatgacgtcggcttgttgtttgaaggtggcgagatcacgttccaggcgagagttgaagaatgagtcttctttcatcactggttcgtagatgatcacttcaacgcctttcgccttgatacgtttcataatcccctgaatggaagacgcacggaagttatctgacccgctcttcataatcagacgataaatacccaccacttgcggtttgcgtgacaaaatggcatcggcaataaaatctttacgcgtgcggtttgcatcgacaattgccgagatcaggttattcggcacagactggtagttcgccagtaactgcttggtatctttcggcagacaataaccaccataaccaaacgacggattgttgtaatggttgccaattcgtgggtcgagacaaacgccttcgattatttgacgggaattcagacctaaactttctgcgtagctatccagttcgttaaagtacgccacgcgcatcgccaggtaggtgtttgcaaaaagtttaatcgcttctgcttcagtggagtcggtaaacagggtcgggatattttgcttaatcgctccttcctgtaataacgcagcgaaacgttctgcgcgttctgaacgctcaccgatgacaatacgtgaaggatggagattatcgtaaagggctttaccctcacggagaaattccggagagaaaataatattttcagtacgatatttcttatgcatcgctgcggtaaagccaacgggtaccgttgatttgatgatcataaccgcataaggatttatctctactacgtctttaattactgattctacactcgatgtattgaaataattagttttaggatcatagtcggttggagtggcgataatgacataatcagcatcccggtaggcttcatttttatctaatgtggcattaaagtgtattttatctgattgcaaaaactgctgaatttccttatcaactataggagatatccgatcattcagcatagcaacgcgtgacggtaaaatatctaatgccacaacctcatgattttgtgcgattagaagtccgtttgacaagcctacatagccagtaccggaaatggtgattttcatttcatgctctcagaattaacttaactgtgaatcatgatgtttttagcatcctgataagagttaaaagttttaacgctacgtcgatagctggtcaacgcaacgaaaaacaattcagattttctttataagagtagctgatatttattaagttaatattaagcagtgaaatttagtctataagataattggcaaaaaaaagcccggcacaatttacgccgggcctcaatttattgctagttaagtcagattaatccagccattcagtatggaacacaccttctttatcaatgcgcttataagtatgtgcaccgaaatagtcacgctgtgcctgaatcaggttcgcaggcagaacagcggcacggtagctgtcataataggcaaccgcagcggcgaaggtcggaaccgggataccgttctgtactgcataagcaacgacatcgcgcagcgcctgctggtaatcatcggcaatttgtttaaagtacggagccagcagcaggttagcgatctgcggattttcggcatatgcatcggtgattttctgcaggaactgcgcacggatgatgcagccagcacggaaaatcttcgcgatttcgccgtagttcagatcccagttgtactcttcagacgcagcacgcagctgagagaagccctgggcgtaagaaacgattttgcccagatacagagcacgacgaactttttcgatgaactcagccttgtcgccagctggctgcgcttgcgggccagagagaactttagatgcggcaacgcgctgatctttcagagacgagatataacgtgcaaacacagactcggtaataagcgacagcggttcaccgagatccagcgcactctggctggtccatttgccagtacctttgtttgctgcttcatccagaatcacatcaaccaggtagttaccgtcttcatcttttttggtgaagatatctttggtgatgtcgatcaggtagctgcttagttcaccgttattccactcggtaaacgtctgcgccagttcttcgttggtgaggttcaggccacctttaagcagagaataggcttcagcaatcagctgcatatcgccgtattcaataccgttgtgaaccatcttcacatagtgacctgcaccatcggcaccaatataggtaacacatggctcaccgtcttcagctactgcggcgattttggtcaggatcggtgcaaccagttcataggcttctttctgcccaccaggcataatggaaggacctttcagcgcaccttcttcaccgccggaaacaccggtaccaatgaagttaaagccttctgcagaaagctcacgattacgacgaatggtgtcctggaagaaggtgttaccaccatcaatgatgatgtcgcctttatcgaggtatggtttgagggaatcaatagcagcatccgtgcctgcacctgctttcaccattaacaggatgcgacgaggcgtttccagagattcaacaaactctttcaccgtatagtaaggaaccagtttcttgcctggattttcggcaatcacttcttccgtcttctcacgggaacggttgaaaatagaaacggtataaccacggctttcgatgttgagcgcaaggttgcgccccatcactgccataccgactacgccaatctgttgctttgacattgtttactcctgtcagggggcaccgccggagcgggtaaaatatattaaatactaacgtaactaagttgatttgaaaagcttaataaaagtggtattacaataatcaatgagcggaggaaattatttccgcaatatattgtatactaatttcagtaatgaaacaggcaatattctagggataatacgaattacacctgtatatatgacacctgtcagattatccaactgtaattcatattttaatttcgccaaaagaatctcactcctaatataggaatatcctttccgtcgacacagcatatttctgcctgcccgaacattaacaagaacctcactcaaattatgagtgcgataatcggctgcaagtatcctaagccataagttataatcttccattagataatgatgttgatatccaccaagcttttcaattacggactttctgaaaacaacagtcatatggttgaaaggatttcttttttttgcaaatttttttatatcttcatggtatataactgaaaatctttttccttgcctaattttcattgtattatcaaattcttcaatggcacttcccaaaagaacaacttcagggtgtgatttcatatagctaagttgaagagcgaaccgttcaggcaaacaaatatcatcagtatccatcctaaaaatcagttcattgcgacaatactgtagaccatgattaagagccttacctagaccaacattattacttaatcgcacaatatcaatgggtaaacgtgatgaaaattcattaacaacatgtagcaaatcatcactaatataaccatcaaagacaattacaatttgatcaggtgcgcatgtattgcttgctatactttctaaacaatcatgcagaaaaagtgcagactctttgtaatacagggataacagaacgctaaatttcattatgatatacaaaccctgaatgttttatacagttttaaaaatccaaaaaccagcttttttcttaatagatatcacatcaagaatgttaactataattgctgaaaaagcagttgcaatagctgcgcctaaagctgaatatataggaatcaatataaaggaaagaactattgcaagaaaggttcccgtaaggacatttttcttatgctctttttccccatcgataaacatgagaattatatcacatgcaccagttaagcaattaaacacttgagatactattaatactatcaaaactgcctgatattgatagaaatcatttccaaatagtaataaacattctttagaatatagaatcaaaattcctgctacaggcactcccaaaaatgaagaaaataaaactgaatgatacgcacttttatgaatggatgtaaaatcctttaaactatacgccctagaaacctgacttgaaatgacaccacttattgctaatacaaaaaaaccaagtaaagttgaaattctttgcgcgacaataaaacctgcgatatctgctttgaccgaaaaaatattaataataatttgtgagccatacattgtaattatttgcagaagctgaattttaaatagctctttacaggatttatcaaacccttctggtttataatataaaggtgaataattcgatgtcaacctatgatataaatacaacagtccaaaggatattaatcccgcaatagtaataatcacgaactgttgctctagcgtcatgaatgataattttttattttctaaataaaatactccccatagaaacgcaatcaataaaaacgagaatagattaaaaatagcccgttgactaaggatcatcatcgttatatttcctattccttgata

SEQ ID NO: 185 - DNA, 1347 bp, Escherichia coli
  modified_base (3)..(3): a, c, t, g, unknown or other
  modified_base (16)..(16): a, c, t, g, unknown or other
  modified_base (20)..(20): a, c, t, g, unknown or other
  modified_base (1208)..(1209): a, c, t, g, unknown or other
  modified_base (1211)..(1213): a, c, t, g, unknown or other
  modified_base (1227)..(1229): a, c, t, g, unknown or other
agnatcaacattaaancaancaaaataattaaattgtttatttcatagccttcatataacaaataaaataaaaatgctggtgacaaaattaaaaacattttatttgttcttaagacaacacttcttaatacaccgatttgttttttctcattcccggctaaacgtgctactgccttcgcgatcccaagctcagcaccttgagaagcaatggtcacaaaaattgtaataattgttatatagaagaaaatagtaccagcactttccgcaccaaaaagtcgagccacaatccagctaaaaaggaacgaagaaataacagtaaacattcttaataaaagtgataatattggctgtatatattttaacatattcattaaaataatatctcccatgatgtggagattttttttcgtcgaatctttgcaggtctgatttatgttttacatatttcttatcatatttcttacataaaagtctgatggctttttcggcaagctcattgcatatattgttctcatcagaggtttttgtaagagaaactaatgattcgtcaccccagtttacaagaatttcatttggtccagtaggacaatcagtacttaataccggcgtgcctaatattagtgactctataattacggtaggtaatccttctgaatcagaactcaaaattagaagttgagctttattaataaaatagtatggattagtctgaaaacctaagaaatgaacatatttttcaatattaagttccttgactaaattttgcaaatcattgcgaagttgtccttcgccaataataagtaaatctatttctccatactctcttataattttgggcatagcttttattgttctatcaactctctttctatccgttaatgtagagacagtcacaataaattcctttggtaagggtatatttccttcacattgaattcttgaattaccttctagctcagtaaaattaaaaggattatatatagttataatctctttatcattgaaaccttttaaggtcagtaactcatctgcaattccttttgatacagaaagtaatttaacattacgaaatattttgctcaatggaagcaaagtactaaattctcttctactgaagatctcaattggactgttatgaaagttgacgtaatagttattagataatttactctcaaaataaatcctatcaacattgacatatacattannannnacaattgcatcaannnttttagtgttaataaatttcttaaatgcatacatctcgcatggagcttttaaaaaataaaaaaactctttaatttcttagcatatagttttataaaattaaaaaaaacagaattactt

SEQ ID NO: 186 - DNA, 335375 bp, Escherichia coli
  modified_base (750)..(750): a, c, t, g, unknown or other
  modified_base (756)..(756): a, c, t, g, unknown or other
  modified_base (1317)..(1321): a, c, t, g, unknown or other
  modified_base (2029)..(2029): a, c, t, g, unknown or other
  modified_base (2216)..(2216): a, c, t, g, unknown or other
  modified_base (2220)..(2220): a, c, t, g, unknown or other
  modified_base (109125)..(109126): a, c, t, g, unknown or other
  modified_base (109134)..(109136): a, c, t, g, unknown or other
  modified_base (109140)..(109141): a, c, t, g, unknown or other
  modified_base (319319)..(319319): a, c, t, g, unknown or other
  modified_base (319324)..(319324): a, c, t, g, unknown or other
  modified_base (332340)..(332340): a, c, t, g, unknown or other
ttatagttgtaggattcactttttttattttaaacttatctctaacataaatctctatcccatcatctattttataatgtatattatcaacgcgatcaagaagtaatgctactttatgacctctatcccgaagagacttagctaaattaagaataactctagccccacctgttccgcttaaagcgttattaataaatagtatatttttcatatagattagtgattgataattgttctatccgatgatcgtggagtaaataattcggagttaaagctatctgaaagatagattgatatgagtagttatttctactttgttgcgattgaaaaaaaataaaaagcaaacaaaaaaataaacacttataaagaagattataactgtattcctttttaaggcttttgatggctaatggtaaagcaataatcaatgatatataaaaatattgcccaaacctcattatatttaaattacccggggcaattatcattaataacccagcagtaaacaataaatttcttaatatataattatctttaagattataaattgaaaacattattagaaagatgtgaaaaacaaacccaagtccagtgccgaaccctccttgcaaatgtgcaaattggctattgccatatatttcattataatatggtatattattatatattaaggcttgtatttccgttgtaaaacctgaaagatacaacactaacaaaccaaataaaccgattattaaagttaatggttcnaatttnaatcgattataaaataaacaggcattaacattaatgcagataaatggaaaaaactagcaatgataatggctataaaatatcttaaaggctcttttttttctataaattttattgaatacaaaaatatggcaacggctaatacttgtctgatacggtcaagtgaatctaaataaaaaccaacaaagcaaaaaactattattccccataagaatatctttctctccaaaataactttgaacacaaaaaacaaggttaaaaatgagtagactgcaaagacaagaacataacctcgatctaatgaactaaataaagtagacagatatccaaaaaagtatttatcatatgtaatatctattctacctgctactatatttttatatatatatacatacgtttcatagtcagggcctacatcaaaacgtagcgcagataataaaaacaaggaacaaaatacacatcctatgcttaaaaacttgacacctcgtgaagtaaataagttaattctttcatgaacgtaagcaaagataattgcaaataacacataaaaattatatatgaaannnnntgtcatttcttacctttaacttcaaatttatttgatatattaccaaaatgttttgataataaaggactaaatgatgttcctttgaatatttttcgcgacatggaatgttaaatattcccccagagaatagagtaacagctgttttaatcattggagaattaagcactactaattcaacaggagccttaaccttgttcactttcacatctttaaaatataatgaataatccgtcaattcgcgaggatgctgtcttattactatttttttatcattatactcttttattatttcatcgtataatctgatttttcattttcactaataaaaccatcttcacttaaaggctgagttaaaatcatgacgtcagcaaccaattcatcttcgatacagtaattaaagatatgattaatttctttttttgtactgaattaagtttttcccaagccgcaataaggtcaaaaaactcaactttgtcatttatagttggatcaattatatcaatcattccagaaagaagtattttatttactttggtagagcgcccaaatgtatggcctcctattataagttcatatagacgagaataatgtgggtatctataatttgccaagccgtcctcaagcaagatgaactcgtttaagaagggtttagaaaaaaaaagatgatcttgccctaaaaatcgatagtcttttctattagaaattaantttcttaacttaggatttattatcaacctgaataaaaacaaaaataataaaatattttactagttttrttgttcccttttttaattatatatcgctctttacctgggaaatttatatcacgaagcgaaacattatctgaatatatatatatagtatcatgcaattgatggttaaataatatacaatnaatnagcaagcaatatggagaatcaaaaacaaatacattatttctcattttcattatatagctctatactacgaaaggtttgtctatttttaaacacctagtttacagtaaggcttaaataaacttagggctgttaccttaaagttcaaatgacacatcataaaaatccttatattgttcatggttacttaacaggaattctttgatatgcttataggcattattcatcacattatgtttataataagggttcaccgcattcttaataccattaatgtaatgttcatctaagcatttttttattgcttcagaaatgccttcagtactgcattcacaatttataacagtagttccgtgaaccctccctttttgcctgtctccaatattaactgtgggtactccaagcgaaggaacttcaattaaaccagaagaagaattacctattaaaccttgcgagtacttacatagtgcaagatattcctctggtagtatagaaacaaaatatttcgtattattctctttacaaaaatttttaattttttgtgtgattttgtctgaaccagtgtcagaattagaaccaatgaaaacaaaattatattttttaatgaaggagtgtaaactttttaataaagattgaacttgaatttcaggagaaacaccactaagcgtttcaggatgaaaaacaaccacaaaataaggtttagataaccctccaaatttttgttcaagaacatcttttggtggtagagtaagtaaaagtgaattttcagctccaagagcacctatatcataaacgttagatggatgctcccccatctgaattatcctttttctgtattcatgcgttgaggccagatgtaatgaactcattttagtgattgaatgcctaataaattcgtcataattacctaaagttttctcacctccatgaaaatgaataattggtaagttatgcatagctgctgctaatgctaccgacatgatttcatacctatccccaagtatcatcacagcatcaaacttattatcttgaaaatatataccaaattcagataaacatctcgacatggtttttattatctcagcgttcgtgtcattattaatctcgatatctattattttatcgacacgaaaaccatcattttcaataactttgtatgtcattccatacttcttatcacagtgcattccagttgcaactatagatagatctatactatcatcttcttttagttgctgtaataatcttttcattattccatattcagcacgagaacctgttacatataaaatctttttcattttattaactccataagttctttttttagttgtctatatgcttttccgttgaaatgtaacccatcatatgtaaaatcagcagataaattcccaaagtcatcataaaacatatcagaaagtgatacccatctgacgtgattaattttatctaaacccttaaacaagaaagcattcaaatgctcaatgactttattatttctatcaacccttccattaactggaggcaatgataaaaagtagataattacatttggattaagttttactattttatcaattattttcatgagccatcttaaggtgtcattctcatcccaaccctgaataacaatatcatttgtacccaacattaaaaaaaccacatcaccaatttcttttatgagattagcatcaaggataaggttataataatcttcagatgtaatacctgagacaccataattatttacctccttacctgctaaatcagataactcccagttatcaaatatggagtgacctattaatgtgatcggttttatggcatgagttatcgaaaatttttgtttaattcgtcgcgcaacagcttctttgtctattttatttttatttttttgtaacatccgtgaaatagcaaattcaaaatccagcctatcatcaatatctattgaatcagccttattcataatataagccaagctatcagcgccaaaaaaatgtttctttttaagatactcttcaactgtgccaataaaaattgcgccattgggactgtattctttttgattatcttgtcgtctatagccactgtagtcattattgaaattactcagtcgcattgaggaatctaaagttttcattaaatctgaggatatttcgctttctgtcattgaaactaaaaaattggcttcaacatccccctcaaaaagcgtaatggcttcctttatatgatgggcatttctaaaaggagacgtcggttgtaataacataaaatagtcacaatctttattgtgactcaatacattctctataaccatatatgtagttgcagtatctgatgcaagctcttcacttctaataataacttctgcaccgtatctctcagcgatacttttgtattctaatgaatctgttgaaacaataattttattaaagcactgcgattcttttgccgcctctatagtataagctataagaggtttatctattaacattaaaacatttttatttggtaacccttttgatcccgctctagccggaattatcgctatcctattagtcatttaaattagatctcctgttcatcgaatccagaatgacttattaattgatcctcatcgaaatttttttccgccttcttgcctaagatatcataccaatacataggactaattccgtttcctggccgctttgtggtgatattatcaatcgtatatatttcacctttttaatgttgcattttgccactatggactttcttgctactatcttattttttgttcagattttgttactattttcgcatagcttcctaaacatttttcaacagcccgaatcccctcacacaataatcgtagctcatctggtgtaactgatgccttatgatcaggcccttcaaaatctttatttagagtaaaatgtttttcgatgaatgtaattccatacggaactgatgcaatagctgcataataacctggtgaatggtcagaaaagccaacgttatatcctttaaattcattctttagaccaataattgagtttaaatttacatcttcatatggtgtaggatattcagtgttacaatgtaatattgtgatcttttcaggaaccattccatttttagtaagaacatttacacttgctttgatttcttcaattgtggccattcctgttgacaatacaatctcttttccctcaatcggcaatctgcttattttttcaagatacgggagattaagcaattcacctgaaggtattttccacattttttgatttcttgaagcaagaaaatcgatagattcaaaatcaaatggtgttgaaaagacatcaagtcctaactcttttgcatattcttcaagttttataaactcttcataaggcagctcaagcttccttgtcatttctaattgggattcctgattaccagttacttttatctgatactctgccttaggtgcgtatttcgaaattaattgatcagctttaaaagtctgaaatttgactgcatcaacaccagcttttttggcttcttcaaccattttttttgcaagattaaaatcaccattatgattacatccaatttcagccacaatatatattttattcatttgcttacctttctcttattaatcttgttggtgttcctgcaacaacaacattattagggatgtttcgtattactactgatccagatccaacaattgtcgagcttcctatttttatttgcccatttacaacagtacaactacctataaaacttttctctccaacatatacatcaccattaaggactacattagttgaaatattcgtacaatatgaaatatgattcccatgttctatcaaggctctagtattaattacgactccatcctctaattgtgaatcacaatttactatagccattttcccaatgtaaatacatgttccgattgaagatcttgttgatacaattgctgttttatcaatgacatttatcgtttcaagctttagatctcgtatttgacttaaccataatgctctatcatcaggatcaccaatggcaataaaataatagtactcagttggcaaactaatatcacttaatgaatgaccaacgataggatatccttgatgcattccggatttcagtgaatcaacaaacccttcaagagcgtattcattatgatccagactatctattactgctttagcaaacccaccagccccgattatgatcaattttttcttcattcacgcaccataagtgaagtttagcatttgaattcgccttccagtgagggcattatcagacacgctaccgccccaggcttaacagctaccagtgcactgtagagatttattttttgaaattagaatccttttaaattattttaaaaatttaaaagaagatattctaattgtcttaccaatccgctctggaaacaaggaaaatcctggaaaactttgactaaaatcctattgctaactcgttgttattctgattgtttatataaaacaacggcaggaatattcgcaacaaattactttcgccacaaatcttcactgccgttataattttcttatcaaccgttacattcggtcagattttcattattcgcttaacagcttctcaatgcctttacggaacttcgccccttctttcaggttgcgtagtccatacttcacaaacgcctgcatataacccatttttttaccgcagtcgtagctatcacctgtcatcagcattgcatcaacagattgttttttcgccagttcggcaatagcatcagtcagctgaatacgtccccacgcaccaggctgcgtgcgttcaagttccggccaaatatcggcagaaagcacatagcgaccaacggccatgatgtctgagtccagcgtctgcggctgatcaggtttttcgataaattcaacaatgcggctgactttgccttcacgatccagcggctctttggtctggatgacggagtattcagagaggtcacccggcatacgttttgccagcacctggctgcgtcccgtttcgttgaagcgcgcaatcatggctgcaaggttgtagcgcagcgggtcggcgctggcgtcgtcgatcacaacgtctggcagcaccacgacaaatgggttgtcaccaatggcgggtcgtgcacataaaatggagtggcccaaacctaaaggttcgccctgacgcacgttcataatggttacgcccggcgggcagatcgactgcacttccgccagcagctgacgcttcacacgctgttcaaggagagattctaattcataagaggtgtcaaagtggttttcgaccgcgttcttggacgcatgagttaccaggaggatttctttgatccctgcagccacaatctcgtcaacaatgtactgaatcattggcttgtcgacgatcggtagcatctctttgggtatcgccttagtggcaggcaacatatgcatcccaagacccgctaccggtataactgcttttaaattcgtcattattttcctacctctaagtggctgatagtgcgtaaattattgccataggttagccaaacggtatggctatataccaaagcttagttccgcataactttgaataaaccttacgataacactacacaccatcagcatctgggttactcggattactcggaattccgcatactgataatttaatcagtacctctttccgaataatcgtagtccaacctggtccttttttctctgactcgtctgcattactcagaaacaaacgttatgtcgtcttttttggcatgaacgaattcatactgcagagttcgatccagaccttgcgacagcgtatacggtgccacaaaacctgaagaatgcactttcgttgcgtcaaactgtgttgttgcgcagaattttttcacgcgcactgagctgacagcgtattttttgcccgtaattttgctcaggatatcaaaacaatatccccccagcattcctagtgggtaaggcaagtgcatagaagggatctttttgttcaggctttgttcaacttcagcaaccaactggttcatgttcaggtctggcttatcaacgtagttataaacctcataacctgcggcaacattcttcagtttgtacttgataaactcaacaatgtttccaacataagccatggacttatagttagtccctgcgcccaccatcataaacttgccgccagcgatctgtttcagcaagttatagacgttaccgcggttccgttcaccgaagataacggtaggacggatgatggttaatgaacgttctgttggtgctttgttataccattcacgcagcacttcctctgcctgccacttacttttgccgtagtggttgaaaggatcgtgtggatggttttcgtcagggttgtgtttgttcaaaccataaacagcaacggaactggtaaagatgatatttttcacgccatttttttccatggccgccagcacattgcgggtaccctgaacgttgacatcataatagagagaagtagggctgacgtcatcgcggtgttccgctgccagtagcacaacagtgtcaaaaccggctaacgcctggtcgagtgcctgttgatcacgaacatcaccaatctgtgtgatttctggataaaagtggctctgctgtttgtccaggttcttgatattaaagtcagcaattgccgtttcaagtagtcgggttcctacgaatccggaagctcctatgagcaaaacgttatcgttcataaatcactttagtctggttgttacgtaagaaacacaagataaagatgagtaccttccctgagtagtcaatgctgcccagccccagctttaacagttagtgtgaggattataatcttttagaacattatatccagtaagtttatgaatggtcgcaaatctactctctccgttccggcaatctaaagttaatcttttccacattaacaatatggtgattaatcctgtcgatatcgacggagctttgccctctttcattcaccgcatgaacatttgcaagagacagcagtgtttcttttttcgccataaagacgccgcgaacgtctttgcgcatgtcgaagttcatactcaatgctggtccaactgaggattcctgcatcacattgatattacgcataaaaaggtgttgcggtttattgtgtagctcaagcgacgcacgcttcatctcaatgttagtcagcgccacaaaggagacagcattcccggcagagatttggataccgcgcaatttgtaagcaaggtgggtattatccagttgaatattattcactcggaaattttgcggtatcgagagatatttgcctttaattaccccatagccgattaacatcccggcgctattaatcatttcaatattatcaatcacgaaattgtcacaaccgtaaatagcgactgtcgcgttatcaatacctgctttcttactgaaatccggcgtgatattgcgggctttgatattacgaataacaaaatgtttaccattttcaacatggatcaactgccgacaatccgatcccgtgatattcgccacgacaaagtttttcactgcctggtcttccgggtagttattatcataagtactccccgcaaggcctatgccgatgccccagttgattttgccgttagtacagttgatgcgctcgatgacatggtcagatatcaaaatatcacggtcgttaatcgccacgttccattcaatagcgtccccctgtaagtcgctgaacttacagttggtgatgttgccaccgataatctggttatgaaatccctggcgtaagatggcgtaattagcgtggctaacggtcaggttatcgatggtcaggttacgcatgactcgtttgtttttgccgccaatataaatctgcgttaccgggccaaagccgctcatcgccagccctttaatagtgcagtcagagccgcgcacatccagggtgatgttatgcatactgccgcccttctcccctgtcacctggctgccgtcctgtaagacaaatcgccctctgccgctgccgcgcaggcttccaagaatgtgtaacgttttgccaggaggaatgaagatgccggtgttgatattgtcgcaaaccaatccggcaggcacgacgaccgtttgcccttcgccgaaggcttgtttaaatgaggcgatccagtcgtgtgggttgtagtcgttaatgttaacgctttgtcgggcgggaagtgcgcgagcgaaaggggtatggaggaaggcaagcgccgagcttgccgtcaggaaggtgcgtcgggagagtgttttaaatggcatgcgttctcctctataaagcttgcagcaagctggcgagttctcgattaatcacctgctggttaaaatcgtgttcgactttttcgcgcgcacgtttgacgaccggagccagttcgtcggtgtccagttggctaaacgccgctagtcgttgcgccagtgcgtgagcatcgttctcaggcaccagccagccggatttatcggcctccaccagttctggtattccgctatgcagagttgaaacaaccggaatgccgaccgccattgcttccattagtgccaccggaataccttccatatcgccatccgcgcctgtaaccgatggcaacaggaagacatccgcgttgtcgagcatcgctttcacttcgtggctcggtttaaagcccggcatctccaccacatcttccagttgatattgttcgatgagggtgcgcaggcgtcgttcccacgggccaatgccgaggatgcgatagcgaaatgccacgccctgctctttcaactgacggcaggcttcgatcgccacatgcaggccttttttctcggttaagcgtgcgacggaaatgatttccagcggcgttgcgggcgctttcaccggacgcgggctaaagcgcgtcatgtccacgcccatacgcgatacggcgattttttccctcgggcagcccattttttgcagccttccggcccacaaatcgcttatcggtaacatcaggtcgccacggcgaaacagttgttgatattcgggagtgtagtggttgagcacttcccgactggaaatatcaatgccgtggaaaatggtggcaattttgccgcgaatgacacccagttcgcggagttttgctgcggttaccccgctggaccaaaatgagcgatgaacacatcggcgcgaaacggtgttgcgacctggccgcaaatggcagacaaaatcagattccgcgactctgcgccatagcgtttgaggttgagcgcctgccaggtatttttacgatgaatgcctcgtaacgtctggctggcacggtggcgtagcttcgccactttgcccgtaggttcgtcctgtaaccagcgggttctggcggcaaggttgtatttcgtccatgccgcgtgggtgttctgggtgtcgcctttttgcagcgcgacaatctccacctcaaagcccatatcaataaacgcggtaatttgattgaggacgaaggtttccgaagacagcggaaatttcagtaaaaagaagccgaccttcatttcacctccccgatgcgctcaagcacagattgcaccatctgcattcccgtctgacgctcacgactgacggcttcgctaagtcgtgcgttcagcgccggaagctggcctaaggtatccgcaaccatcgcttgcaggctgccgtctaataaatgacggatatcaattgccatctccggtagtcccagctgctgcataatcccggcggatttatgttcatagttgatggcaatcgccggagtagcaaagttcattgagataatggcggagtgcaggcgcgtaccgacggtgagttcacaggcaccgagaattttgcccatttccagatcgttgagttcatccatcactacgtgataacgggcaggatcgctgatatgctggcgcaggttgagcgccaccatgcggtcgtctttgttatagctgtcgatgcccgtacaggtggagagcgcaatcacctgatacccttcatcgagaatgcgatttaccaccccggcaaaggctttttcatacgcttgttgagtggtgccgagacgtttgtcgaacggtgccagttcgcgcagggtaattgccaccgttttctgttgtgcggcaacgtccagccagtgttgaacagcatagctggcggtgaagtcttctgtgtggtgatcgaccagccacgcggtatcgacgccatgttccacttttgcagtggtgatattgctgcgtttcatcagatcaaggctgaccgattcgcgcaggatcagcgcgtcacagtgaccaaaaacgtagttcgccagttggttaaattgctcatcctggaaggggccgacgctgtgaccaatcataaacagcggctttttcgccataaacgtgcaaagcgcatgttcaaactgcggcacgccgtagagatcgacaaaaaacgatcctccgacctggataatggcgtcgtaacctgacagcaggcgcacgaagtcggtgaatccctgggcgatggcgatattacgcagcttgccagtgtcggtgacgcgcgagagcagtacctggtgctggtagcggcgacggaggacttttttaacgcgcccgacaacgcccgccgcgctgttgtgttgtttcatttgaaggaacagcggatcacccattaccgggcggttgagcagccaggaagaactgaccggatagcggctcatcacgtccacttcggcttgtggattgaggatgttgatggcatcaagtaagccgcgcaggatggcgctgtcgccacgattgccgcaagtgtggttgcccagaataagtaatttcattttttcctcataaatttgatgccaggtgaggctgcgtttgttttgttcgttgccgctttttgcctgatgcgacgctgacgcctcttatcaggcctacaagatccaagcacagaaccgtaggccggataaggcgttcacgccgcatccggcattcagtgcctgatgcgacgctgacgcgtcttatcaggcctacaggtcctacaggtcccgagcacagaaccgtaggatggataaggcgttttacgccgcatccgacaaccgttgtcggaaccgaaaacagcaactcaccccgcccgtaaaagcattttcattttttcgctgcgacaaaactgacgcttcacttccaccaccagcggatggcgcgacagcacaatcatcaccacaaacgccagcacgcccgcggctatttgcaccgccagcagcatccccagcgccagttgccctttcagcacaatgcccagcgcataactaaccaccagcgtcggcagcgagagataaaacggcagccacaaactcaggatgtactggcgataactggaaccgagcaccggtttaatcatcacgaagtaactcagaatggtgttgataatctgcaccagcaggaaaccgagcgtgacgccgattgcgcccgccatctgcccaccaataacaatcgccggaataaacagaaaggttttgaatacgttgaatttaaaactgatatcgacccgcgctttcgccatcagcagcgaaccaatcgggttacccacggagcgcagtagccccaccacacacagcaattgcagcaccggaataatgctgttccacttctcaccaaagaccagtggtacaaagttattcgacaccaccatcagccccagcagcgccggaaagttgataatccccaccaccgacagcagcttgtagaagttaatgcgcagcttttcggtgtcgtcctgaattttggcgaatgccggaaataacacgcgggtgatgatggggttcagcttcatcggcggcacaacggccacgttgtaagccaggttgtagccccctgccacgcccgcgccgagaatacgcgccagcaccagcgttgaaaggttggtgttgagatagttgatgatgctgtccgccgtcagccatgcaccaaagcgtaagttcggtgccaccgacgccagcgagaaatgcagaccggggcgataaattttgcgtccaaagtagccaaacagcagcgttctcaccgcactattgaccagataaccgaggatcgcggtcatcgccagcggccagaaatgggcgctaaccaccgtaaaagtgaagcccgccagcaccgcgctggtttcgatcatgccgattttgttgaactccagctccttctgcatcaacgcgcggaactgttgcccgtgggggatcaccacaaacgccagcgacaatgttttaatcaacggtgccaggtccgggttattcagcacgtcgccaatggcatcactcaacaaaaacaccgccacgcacaccacaagccccagcccgacgttcagccagtacagcgtggtgagttcaaggtggctgatttcttttcgctgaataatcgagttagcgataccgaagtcagaaagcgtatctgccagcgcgatgatcaccagcgacacggtaagcaaaccgaactggtggttgtcgataatccgcgccagcacggtcatctgtaccagcccgaggccgatgatgatcaccgtggcaatcgccgaccacttcgcgccgctgatggttttttcacgtaagctcatatcaatatgccgctttgttaacgaagcctttgaataccgtcaggaaaacgattttgatatcgaaccagacgctccattcgcggatgtactcaaggtcgaactcgacgcgtttttccattttctccagtgtgtcggtttcgccgcgccagccgttaatctgcgcccagccggtaatgcccggtttcaccttatggcgcagcatgtagccttcaatgagctgtcgatactgttcgttatgcgctactgcgtgcggacgtggcccgacaatcgacatcccgccggtcagcacattgataaactgcggcagttcatccagcgaggtgcggcgcagaaagttccccactttggtgacgcgcggatcgttctgcgtcgcctgagtcaccactttgtcgttctccatcactttcatggaacggaacttccacactttgatcggtttaccatccatgccatagcgagtctggcggaaaataaccggtcctggtgaactgagttttaccgccagcgcaatacagcacagtaccggggagatcagcagcagaataagcgtcgccagcacaatgtcttccgcacgttttatcaggcggttaaccccggaaagcggcgtgtcatacagcggcaccaccggaacgccgttcatctcttcgagacgtgaatggagaatgttgaaggtaaagacatcggggatcagcagcaccgaacaggtggtgtccgccagttgatggaccagttttttcactcgcgcgccgtcgcacatttgcatcgcgatatagacgttatgaatcttgcccgctttcgcatcctcgaccagctgttgcagattacccgcccagtcgttagaaacgccgcccggtttcgggtcgtggtaaacccccaccacttcaaaccctaaccacggctgattacggaagctctccatcagcatttgtccggcggctaaatcccccgccaccgcgaccatccgcttgttatagccatgattacgcagccagcccgcaccaatacgaatacatgaacggcaaaccaccagtccgatgctggtcagcccataccacgccagccagattttcagttgcgtgtcgaaatcattattgaacgccaccagtccggcgctgaaaatcacgcttaaggtccagttttgtagcaacagggcaaattctgtcgctgcccgaacaccgcgccatgagcgataaaaatcggtgatgccgcccagcatctggaacaccaccagcgtaatcagcgccaccaacaggtgcatgtagaggaatgacagtccgctcacttcgcaaaccagccatagcccggcaaacatgatggtgatatctgaaaagcgttgcaccatagagattaacgatgcattggttttcgctcgctcgcgcttttttagatttgtcatcgttgttcctgttattagccccttacccgcagtggggtaagggaagatccgacattactcgttcagcaacgtcagcagagttcgcgttcgcgcttccatcagcggcacatcaccgcgcgattccacattcaggcgcaccaccggttcggtgttggaggagcgcaggttaaaacgccagtcggcaaaggtcatgctgatgccatcggtgcgatccaccgccagcgcctcacggctaaaatgctgttccacgcggttaatcgcctcaacgggttgcgccagtttgctgttgatctcaccgcttgccggaaacgccgccatccggtcgcgcaccagttcgcccagcgttttctctttcaggcataccagttcggctaccagcaaccacgggatcatgccgctgtcgcagtaagcgaaatcacggaagtaatggtgggcgctcatttcgccaccgtagatggcgtcctccttgcgcatacgttctttaataaaggcgtgtccggttttcgacattaccggcgtaccacctgcggcagtcaccacatcaacggtattccaggagagacgtggatcgtggatgatcttcgcgccgggattttttcgaggaacgcttctgccagcaggccgacaatgtaatagccctcgataaactgccctttttcgtcaaacaggaaacagcggtcaaaatcgccatcaaaggcaatgcccatatccgcgccgtgtttgatgaccgcattgcgggtgtcgtcgcgacattccggcagcagcgggttaggaataccgttggggaaattgccgtccggcgtgttgtgtactttgattaattccacgggcgcgccgagggctttaaagcgggcttcaatggcgtccactaccggacccgccgcgccgttcccggagttgatcaccagcttgagcggcgtgaggtttttgacgttgatataaccgaacaggtgatcaacgtaagcgccacgcagattgatttgctgatagcgaccgcgtttggttgcatcaacgggaggaaagtcgttggcttctgccagacgctggacatcgcgcagtccggtatcaccgctgatcgggcgagccccttcgcgcaccagtttcatgccgttgtaatccatcggattatggctggcagtaacttcaatgccgccatccacaccgagatggaacgtggcgaaatagatctcttcggtgccggacatgccaatatccagcacatcgacgcccgcatcctgcaaaccttttgccagcgccagttttaaggtttcgctggtgaggcggacatcaccgcctaacacaatggttttcggtttgagaaattcgccataggcacgcccaatacgccaggcaatatcttcattcagttcttcgcctaatttcccgcgaatatcataggctttaaagcaggttaattttttcatatcgttaccctttttcaggcaatagttggccctgaccgaagcggccaattttgtttttgtcgttatttacatcgcggtttcgcattcattgcctgatgcgacgctgccgcgtcttatcaggcctacaaaaccgaaccgtaggttggataaggcgttcacgccgcatccgacaaacagcgcctgatgcgacgctgccgcgtcttatcaggcctacaaatccgaaccgtaggtcggataaggcgttcacgccgcatccgacaaacagcgactgatgcgacgctgccgcgtcttatcaggcctacaaaaccgaaccgtaggttggataaggcgttcacgccgcatccgacaaacagcgcctgatgcgacgtttacacccgtccgtagcgatccgcgaagcgcaccacatcatcctcttcaagataagagccggagcgcacttcaattaaatcgagcggaattttccccgggttttccaggcaatgcgtcgcccccagcggaatataaatggactcgttttcaccaagcagtttgatatcaccgtcgatagtgacttttgccgttcccgcgacaaccacccagtgttccgcgcggtgatggtgcatctgtaccgacaagccctcgcccggtttcacggtgatgcgtttcacctggtagcggtcgcccgcgtcgatagagtcatatttgccccacggacgatacacttcgcgatgcacccgatgctcatggcgaccatcggctttgatctgctcgaccacttttttcacatcctgcaccgcgttacggtcagcaatcagcaccgcatctttggtctgcactaccaccaaatctttcaccccgacggtggtgaccaggccagattcggcatacacatagctgttttcggtttgtgattaatcacatcgccgtggcaaacattgccctcggcggtgtgggcgctgatctcccataaagaggaccaggaaccgacatcactccagcccgcatccatcggcaccacaacggcatctgccgtacgttccatgacggcgtaatccaccgactcttccgggcaggcgagaaacgcatcttcatccacacgaataaaatcgagatccggatcgacggcgctcatcgctttttcacaggcatcgagaatatccggacgatatttttcagttcttcgagatagcgtccggcgcggaacaggaacataccgctgttccagtaatattcgccgcttgccacataggcctgggcggtttccagattcggtttttcgacaaactgcgccacttcaaaggccaccgtatcctgctcacccgcagacacttcaccgcgacgaatatagccataaccggtttctggtagatccggcacaatgccaaaggtcaccagcttgcccgcttcggcatacggcatggcgttacgtacggcggcgcggaacgcgtcttcatcggcaatcacatgatccgccgccaataccaacattaacgggtcgctctccgggctatgacgttttgccgccagcgccgccagtgcaatggcaggtgcagtgttacgccctgccggttcgagaataatgttctcggtgagtttgttcagttgacgcagttgttccgcgacaataaagcggtgctgctcattgcaaatcaccaccgggctttcgcactccacgccgttcaggcggcagatggtggtttgcagcatggtgagatcgcctttcaggcataaaaactgcttggggtaaagtacgcgggaaagcggccataagcggctaccggagccacctgccatcacaactggatagagtttcgactgcgccataattatccccgaatatcatttataaattgacgtaacacgttctctttatcgagcgtgcgttcggcatattcacgtgccaccgtgttgtgtttgggcagcaggagcgcctgacgaatccccgccaccagagcctcgaccgattccggttctatgcaaaccgcaatgcccggaaaggtttcgcaaagctgccccagttctgtgtgggcttctgcggtaatcaccgcgttaccgcctaccgccagaatattggtcagtttcgacggcaatacggcatctgccgcgccgcgtttttgcaccaccagatggcaatcgcccatcttcagcagtgcgggtaaagcgtcatacgattgcagcgggaaaaattgcatgttgcgcagtccacgctgctgcgccattttttccagccgcgctttgccgccgccctgcccgacaatggcaaaaatcagcggttcatcgcgcaggcgatcggcagcttcaataacgttttccagtccctgcttttcaccaatattgccggagtaaagaatgatttttttgttatccggcaggccaagctggttacgaagggcgtcaacatcggcatctgcaacatgctgaaaacgggcaatttccgaccagttggggaagaaaatgacgttttccgccgccacgcctttttcgacagctttattcatcatcgaacgcgaaatcgtggagacgttatcgacgttatgcagtccgctacgttcgaacgccgttgccagctgtgccactttgccgcctttgccttttccggcaaggcccagccccagcatggcgtccacttcgtaatcctgaatatgcagcacggtacgcgcgccagagagtttcgccagcagacgcattcccggcgtgcaaaacagcgttggcactacgccgataatgcgctccggcttccagcgacgttgcgccatcagcgggaaaaaactgctgacggcaaaactgccgagatgcaacaggcgtttcagggtgctcggctgttttggcacgtacagcgggcagcgccacgccgtggcggccccctcttctcgtttgtaccgccaggcggaatagttctcgcccacctgccactgcgggtagtaaggcggtgcggtaataacccgcacctcatgaccttgtgccgccagccattccaccatctcgccggtgtatttgccgatgccggttaactccggcgagtagttaatgccgtagaccagtattttcataatccgggtactccggcacgcttctcagcgagaaaataggcgcggctgttagcgtgaacatcgttactggcgagcagcgcgtccggcgtcagccagcggtaatcgtcatgctgctcatccggcagtaacagatcttcttcagcgactctgaagcgaaaaccgagcaccacatagtgagtggtgaaatccgtgccggagaagttatcgtcataaaagtgctgccagacaccgtaaaactggcctgctgttatcggcagacgcagccccagttccgcaatcgtcagccgctcaaatgcggcttccagcgtttcgtctttctgcacgcgccctcccggcacaaaccagtaaccctgcgccgggcggttggttcttttgccaagcagaaactcgccgcgactgttctcgacaataaagtcgagagagacaagcggtgtggagcgcactaccgtggcaaagtcttcctgacgtaaaaacatcattacccccgaaagcggtcttgattctcaaggaaccactggtaagtgctggcaagccccgcttccagtgagatttcgtgataccagccaagctgatgcaggcgcgtcacatccagcagtttgcgcggcgtgccatccggtttactggcgtcaaaaaccacccgacctttgtaacccaccactttggcgatggtttgcgccagttcacagatggtgcagtcaacgcccgtgccgacgttaatgtgcgacaacatcggctgggtgttttccagccagacttcgtgcgccagctccatcacatgaatgcttgccgccgccatatcatcgacgtgcagaaattcacgcatcggtgtaccgctgccccacaccaccacgtccggtgcattctgtgccgtcgcctcgtggaagcgacgcagcaatgctgggatcacatgcgagttactcggatggaagttgtcgtgtggcccgtacaggttggttggcatgaccgagcggtaatcgcgtccatactggcggttgtaagattcgcacagtttgatcccggcgattttggcaatggcataaggctcgttggtcggctccagcgtaccctgcaacagctcgctttctgccatcggctgttttgccagtttcgggtaaatgcaggacgatccaagaaacagcagtttgttcacgtcgttctgatgcgcggcgtgaatgatgttgctctcaatcatcatgttctggtagatgaaatccgccggataggtgttgttggcaacaatgccgcccactttcgccgccgccagatagacctggtcaatgctttcgctggcaaagaaatcatgcaccgcgcggctgtccagcaggttcagttcatcgcgggtacgtaataccagctccacatcaccgcgctgttcgagctgccgcttgatggcagaaccgaccatcccgcgatgaccagcgataaaaatgcgttgtttactcatgcttatgactccagcgcgatcgccacgtcgtagccgtgagatttcagcagagagtgttttttcgccgcttcgaggtcattagccaccatttcagacaccatctctctgagggtgatttccggtttccagcccagtttttcgtgcgctttggtcgggtcgccgagcagcgtttcaacttcagccggacggaagtaacgcggatcaacggcgataatcacatcacccggtttaacgcccggcgcgtcatgcccggtgacggaaaccacaatgcccttctcttcaacacccgtgccttcaaagcgcagtttgatgcccagctgtgctgccgccatttccacgaactgacgtacggagtactgaacgccggtcgcgataacgaaatcttctggctgttcctgttgcagcatcatccactgcatttttacgtagtctttggcatggccccagtcacgcagggaatccatattgccgaggtacaggcacgactccagcccctgggcgatgttggcgattgcgcgggtgattttgcgggtaacgaaggtttcgccgcggcgcggggattcatggttgaagagaataccgttacaagcgtacatgccgtaggattcgcggtagttaacggtgatccagtaggcgtacagtttggcgaccgcatacggagatcgcgggtagaacggcgtggtttctttctgcggaatttcctgcaccagaccgtacagttcagaggtggaagcctgatagaaacgggttttcttttccagaccgaggaagcggatcgcctccagcaggcgcagcgtacccatcgcgtcgacgtcagcggtatattccggtgactcaaaagaaaccgcaacgtggctcattgcgcccaggttgtacacttcatccggctgcacttcacgcaaaatgcgcgtcaggttggaggtatcactcaggtcgccataatgcagatggaatttcgggttgcaggtgtgcggatcctgataaatgtgatccacgcgctcggtgttgaatgacgatgcacgacgcttaataccatgcacctcgtaacctttttccagcagaaactctgccaggtaagaaccgtcttgtccggttacaccggtgatgagagcgacttttgacatgtcttattcctctgtattttttgaatttattcagtttcaacgcgttcgcgtatcaccactgcgggattcccccggcaaaccacatttgccggaagcgatttaaaaacactgcttcgtgcacccacgacggtgtcgtcgccgatcgtgacgccaggggcaacaaaaacatctgtcgccagccagcatttctcgccaatcacaataggcgtggcgttaatggtgaaatgttgacttgcatggtcgtggctaccggtgcataaataacttttttgcgatatcaccgaatgtgcgccaatggttatttcaccgagggtatataaattgacgtcatcgccgacccacgcgtaatcacctaaggttaatttccacggataggtaatttttactgacggacgaataactacgttttttcctatttttgcgccgaataaacgtaataaaaaagcccgccagcgatacaatacttgtggcgaccaggcaaatattgttgcctgtactgcccaccataattgcactttaatagcgttgccgccccggaaccctttcggcaccgagaaaccgcttaaatcttgcatcgttttcccttatattcagcttttgttatataaggctttcgtctttgaggtagtacgttggcgtaaatgccaggataattctgcccagaagccaggcacatgtaatatctgccgttggacttttttggcgtcagcacacaattccatattattggtggttgataccccacccatagaaaattcagacaccaggccattgagttttttaaatgcataaccggctttatacattttggctgccagcgcgtaatcagaagaaactttatattcaaggtcataacgccattttttcaaaccggataccgggaaaaatatcgcctgatggctggcgggcaggctgtgataaatataccaacccggtttagcactacgcttaattttatgcccgtcgccaaaatccagcagcgcatcgccggtgatcatcacgttatctttttgcatttttaacttacggacaaaatttgcggcatcctgatgaaaaatatcgcccgagttgagaaacaacgcgaacttgccttgtgccatcgcaatgcctttgttcatggcgtcgtagataccgttatctggctcgctgacaaagcgtaggttaaagataccattgagattttccagatactcacgggtgccgtcgttggaaccgccatcgacaacaatccattcgaagctgatatcttccgcctgcgccagatgcgccagcgaggcatgtgttttgactatcccttcgaggttacgaaacgcgacagtgattatgctaagcaacatgttcttattcttacctcgtaatatttaacgcttttcgcaaaataaacggacagacgattaaaaatgcatattccgggctaaatatcgaaccggtaaaaaacagcgataccggagtgaaaagatataattgcacgcgaaaattgcggttatcaccaaaagcgttgatcatcatttttatcactttccccatgtaccacagcgataaaaacactgcgaaccaggaaaaataaataatcagcagatacaaaccattgtctatggtttttccgacatccgcaccgttaaatattccgaatgatgcgacatactcataaagtgagccaaatctgactacaccgtcaatatgggtcaaagaataaccgaccatcaccagcggaccgacaatacgataatatgatgacgatccttccgtacctaaatcgcccagacgggtggaaatataaggaaacgcgattaccacaccaaccaggaatacagccagagaaatcaatgctaacggtaactttttcttaatcgcctctttattcagatattgaaatgcccactccagcaaataaaacaggataaaggtcataacccctgaaaacgatccggataatattatccctgcgagaatcatagcatctgttttaggcgttttgataccaaactgtttgatactgagccaaattgagattaatgccagagcgaaaaatgccggttcgaaataaagtgctgtcgtgcgcttgccgccgaatttaatgaaattcagcacatagctgttgctgtaaatcagatatttcgaaatcgactccataatactgctgccaccggtgaggataatttgcgccatctccaccgccgccagcgccaccaccagcccgaccaccagataaaagaaacgtaatatcttgcgatggttgtgtggcgaaattgttttaaaacgaatactccacaccatgccaataatgatcacaatatagacaaacagcatagttgaagtgacgtatttaccggcatccaacgactgaccaaacaggtagttaaacgccgtgagtcccgcaccaacccctaaggcaatcatcaattttttaacgctgatgcgctctaaaaacagcagtaacaagacaggtaaaaaagtgacgatggtgatggggaaactttcgccaagctgggcgattttgacgttaaccagcaggtaaatcagcggcagcaacaggtagctacagattctgatagaagttgacatactcctccagcatctgttgtccactgtaggccgcgcggctgcgttggctgaactcagccagcgtggtaccaaatatcgcctgcgcgatttccggtttgcttaactgcaccagttgcagcacctcttcttcactgacggttttaccaccggatttttgcagcacttcccgcgccgcatcgctatgggtggcgatcaccggcacaccaatcgatagcgcctcacacaaaatcagcgggtagttatcgacgcgagaactgaacaccagcgcatccatctgattgagcgcgctcatcaacttgcgcttgtcagtttcaaagccgtgattaaccacgttgccagcggtgaacggcgagaacttaccaaaggtatgcagttcgattttgtcgcccagcgccatcatctcacgcaccagttgctggttagttttgccgtcgtaacgcaggtcatgcgccaccaccgcgattttcggcttgccctgagtttcgcgcaccggaggcaagtccgccagaatcgcttcggttgccatatcaatgccattattgataatccggcaacgccctggcccgtacagactattgaaagcgtcagccacatgctggctgggggaaataaactgacagcccagcgccagcatctcgcggaataactgccgtttgcccgccaccagctggtgcgcgcgatcaatcttcaccggcggatagttatttaaggtcgggcatttctggcagcccgttttccagccttcgcaaccgtcagtaaaggcgcagcgcccggtaacgctccagtggtcgtgcagcgtccagaccagagtgacatccggtttgtggtttttcaccttttcgcaaaagcgcaccacgctcttaagatttagccagtagctgtgcagcacatgaaaatgcaggaccaccggacccggtgtgcaagtaatggtgcgatataactcattgaaattgccaaacagatcgcgattaaacagacgaaacaacgcaatgttcgccatcgcggtcatccgcggcgtatgtttgacgacctgcggatagttttgatggctgacgctctctttgccgcctttgccgtagccgtagacaaaatgtgacgccagcccctgttgcagcgcacgctgatggagatctaacgccacacctgccgccccgccttccgccagtcgcacattaaattgcagaatattcatttaattaccttcactcgcgctttttctcccaccaccagcgcgttgtccgggacagagtcgagcaccacgctgcccgcgcccacggtgacgttgttaccaagcgtgatatcaccaagaataatgacgttggcaccgagttcgacgccgttgccaatgtgtggacatgccatgttatcggcaccacgattgccgatagtgacgccgtggcgaatggtgaaatcatcccccgctaccacgtttttattgatcactacggcgtaaccgtgatggatagtaaagcggcggccaatggtcgcggcggcctggatttcataaccgaaaaagcattcggtgataatgcgatacagcaccagcagcggggccgcccacagattgttgaggacgttctttttgcgccacaccgaacaaaaatgagcaacacgataggcaagaaccatgcagcacgggcgtaaactccagctgttggcacgcagatcttccagcatctttagcgcccccgaataccatcagccagacgtttgccgttacgcaccgacagcagcgtcagcaaagtgcgccaggtcatacgtttattgcggatctggtagagggtaaacagctgatattttttgcttgcacggtcaaatttatctttgtgcttgcggtaaaagtggaagtacccggagaattttttcggtgacgaggtgatctgcatttcaccgtgattgatatgcaggatctgcgtcgcctcttccactttccacggttcgccatactccaccaccatccgcaggaagatgtcgtaatcctgtgctgctttcagttcggtatcgaacaagcactctttgaaacgccacgcccaggtaaaaacctgattgccaatgatattgcgtttatagaacaggcggcgtgagtacggcgatttgggatacagtggtaagcttgctggttgggaataaacttctccctggcatacgtagtcgttagcgtacaaaaaggcgtgagtgaccagttgctgtttatgggcgaggaagacgctcaggcggttgggcgtccattcatcatcgtcatcgatcccggtaatgtattccccttgcgccagcataatcgcctggttacgtaccgcgcacgccccgctgttaatgtcgttgtgaatgtaggtaatacgcggatcgttgagggcagtgacgtactgttgcagttgttcccaggaggtggagcaatcatccacgatgatcatctcccagttgctgtagtcctggcgcaggaccgattttatcgcccgaatcgccagttgttggcggttccaggtcggcatatagattgaaatcagcggattgtctttcataggttgttctcccggagtgtcgagatgttctgccggtttataagcttgtttacgggttctgttgccggatgcggcgtgagcgccttatccggcctacggagctggtttgcttgccggatgcggcgtgaaggtaggtcggataagatgcgtcagcatcgcatccgacagcggatgtcgttatttcgcatccgacttatattcgtattcgtaatagccataatcctgatacgcgctggcgcggcggaagatggagttcagaatcacccctttcaccggaataccgttttgctcaaagcggctcagactggtttccacttctttcaatgtgttgaccgcataacgcgccaccattaacgtggttccgacatgacgaccaacaattgcggcatcggtcactgccagaatcggcggcgtatcaatcaacaccaggtcatagtttttactcgcccagttcaccagttcggcaaagcgttcgctcatcaacagctcagaaggatttggcggcacctgaccgcgcgggatcaggtcaaatttggcaatagaggtcggtttagcagcggtagtaatatcgccctgaccaatcagaatttccgacagaccattgacgttattggtgcccaacagctcgtgggtgtagcctttgcgcatatcacagtcgatcaacaacacccgtttattggtctggctgatcaccgccgccaggttggcgcagacaaaggttttaccaattgacgggctaaccccggtcatcatcaacacattgttctgcgactgcatcatcgcgaagtgcagactggtacgcagactacggatggcttcaatcgccagatcggttggattccccactgccagtagctggctctgtttatagcgtttaacccctttgatggttttgacgctatcgcgcgctttctgccactccgacagcgggatgctggcatagacgctgataccgtgttcttccagcacctgcgggctttcgatgccgcgattaaacaacgagcgcagcagcacacccacgatagagagcatcaggccaagaataatcgccccaaggataatcagccctttcttcggtttcagtacacctggctgggtgattgccgggtcaacaatgcgcacatcgccgacggtgctggcttcggtgattttcagctcctgctctttattcagcagttgcatatagacctgctgaccagactcgacatcgcgggtcaggcgcacaatctcctgctgggttttcggcatcgccgttacgcgaccattaagtttggctttttcgtcttccagcgcctgacgtttctccagcagcgtgcggtacgcggggtgaactttggtgtacagcttggagatttccgcctctttaaaggtcagttcgttcaactgcgcgtcgatgttcaccatcgaatcgagcaccgctttcgcttccagcggcagatcaacagaatctttatcctgacggaaggcattcagtttgttttcggcaacatcgaggcggctacgtacttccggtaactgttgcgcgaggaaagcgaggcttttcgacgcttccgccgatttgcgctcaatattttgttcctgatagttacgggcgatgctgttaagaatgtcgcggatctgttcgcgatcttcaccggtataagtcaggctcagtacgcctgcgtctttgccgttctccgttaccgtcaggctgttttgcagttggttgatcatccccaacgtggagtatttggtgacggtaaactcactgcccgggcgggcgtgaatggcttcaaccatcagcgtgacgccttcttttttcagcatctggcccgcttgcccacgggcgctaaagccgccatcactgctcagagtgtagtttttgtcatccagcacattaagcgtaaacacctggtccgccatctctttcgggcggttaaaggtggtcactttcaccgtctcgttctgacgtcccatcaggcgatcccaacccgcaccgaaaatcgggaacgtgtttttgctcaccgcaatatcgaggtctagatcgtccaccgttttaccaagcaccagacgcgaacgaatcaactggatctcggcgtccgatgcaggcggtttgttggctaatgccgagccaatgtcctgcactaacgaattgccgctgttttgttcgatttgtaccagtgcgtcggcactataaatcggcgtggcgaagaaagtgtaaaccacagcacagagggcaaatacagcggtgatgccaatcacccaccagcgcgcttcaatgacggtgccgaccaggcgaccaatatcgatttcatcactgcccgttaccggagcggcatgttgttttactttttctgtcattcttatacctgctctgcgttcaatgcctgcgcccactggcgggcagaccgttcaagtaatgtgtacaccgctgcaaacgtttcccggcttttgcgatacggatcggggatttcacattcgttatcccagtgaccaaacagcatcactttgccgcgcatctcaggtgccatctcgcataagcgttcgatatggcgcttttccatggtcaaaatcaggtcatagttgcgacacaggcggcggctgatttgccgtgcacagtgaccttccagagacagttgatgttctgcggcgacgctgatagcggtaggatctgcgcccttaccgaccagcgcgccgagtccagcggactccactttcagttccgggtgataacgttgcagtaagcgttccgccgtcggggaacggcaaatattgccgacacagacaactaagatgttgttaaacatgacgattaccagttatgaatgtcgctggctgtatccgtcatgtaacggacaccgctaatagttggcagcaactgattgatcagacggttccagcgggaaaccggggcggtggtgacatacaccacgtcataaggttgcaggcggaattctgtcgccatcaccagcgacgtggcatcggacatatccagctggtagatattggcaatcttgccgttacgcccgccctcgcctttcaacggacgaatgacaaagatgccgctggcgttggaggtggtcatgtcgataccttcagcattgcccagggcttcagtcagggtcataccgctaaagtccattttcagggtgctctgtttcttcacttcacccatcacaaatactttcagatcatcattacgcggcacgtagagaatatcgccggggtaaagcagtcggttctgattgaggtcgccgttttgcatcagcgcctgcaaagaaatgcgttcttcacgaccattgtgtgttagcaccacgttgcgccagtcagcggtgtcggtcaggccacctgcggcgttgatggcatcgagaatggtcagtggtacgttggtaatcgcctgttgaccggatttattcacctgacctgagatataggccttttgtgagcggaaggcggcgatattaacgtccacctgcgggtcagcgatgtacgttgctaagcgcccggtaatatcactgcggatttcagcgagcgttttccccactacgtgaaccttgccgatatacggataaaacatagtgccgtcaggctgtacccagttgccggtgtcgctggagctgcggtactgaccggctggcgtggtgagttccgggtgatcccagacggtgacattaagaacgtcccccggcccgacgcgatactgataattcgcgatctcgctttccagcgtcatattggggcgcgctacattcgggcgtgggcgtaattggtcaatcaggcgcggggtcagcggataaacattcaccattttgtcgagatcgaaatcagcgtcctgctgtttgatgacgtctttgcccatcgtcgacatattgctgcccggaagtactgtgcaaccgcttatcaaggttactgacaccaataatggcatcaatttcattttggatttcatcattgtttatttatcactttggcagagtaattatcctgtgcactattaatagcaatgtcgccatgcacatttaccttgcagttaattgaatacaaatttaactggcatcagtcctaaaaaaattgatttcatccgcaggctattgacagaataattcagactggtctttcaggcatccagacacgctaccgcccctggctttttagctaccaatacactgatttagcttaatttttcaaaccctctctgcatacaattgttgatgagaaagggttattgcggaaattaacttccgaatataaggtgacattatggtaattgaatattggctctccaataatgcaggaggaagtgttacagctaacggaatagcaggcaaggtaacaattcggcaattggctatttttaagaattatattaagtgtcattcaatatggtttttaggagtttctttaggttgacaatatttaatattgcgcctccacatgcgatatttcttaaataatgttttattattaccacttttaattcagggataatgtgaggttattaccctcaaataatatgagataaatagtgctgcaacattgcatttttgccccgatttatccatgatcgaattgtgacatttgtcatacaacgaataggttttgtacttactatggaatggattgccgatccgtctatctgggccgggttaatcacgctgattgtgatcgaactggtcctcggcattgataacctggtctttattgccatcctcgccgaaaaactaccgccgaagcagcgcgaccgcgcacgggttaccgggctgctgctggcgatgttaatgcgcctgttactgctggcgtcaatctcctggctggtcaccctgacgcaaccgctgttcagcttccgctcgtttacctttagcgcccgcgacttaatcatgctgtttggtggtttcttcctgttgttcaaagccacgatggagctgaacgaacggctggaagggaaagacagcaataatcccacacaacgcaaaggtgcgaagttctggggggtggtgacacaaattgtggtactggacgccatcttctcactcgactcagtgattaccgccgtcgggatggtcgaccatttactggtcatgatggccgccgtggttatcgctatcagcctgatgttgatggccagcaagccgttaacgcaatttgttaacagtcacccgaccatcgttattctctgcttaagcttcctgttgatgattggctttagcctggtggcagaaggtttcggcttcgtcattccgaaaggctacctgtacgctgccattggtttctcggtgatgatcgaggcgctcaatcagttggctatctttaaccggcgacgttttctttccgctaaccagacgctacgccagcggactaccgaagcggtaatgcgcctgcttagcgggcaaaaagaagatgcggaactggacgccgaaaccgcgtccatgctggtggatcatggtaaccagcagatctttaatccgcaggaacggcggatgattgagcgggtacttaatcttaaccagcgtactgtcagcagcattatgacgtcgcgccacgatattgagcatatcgatctcaacgcgccggaagacgagatccgccagttgctggagcgaaatcagcatacgcggctggtggttaccgacggtgatgacgcagaagatttgctcggtgttgttcacgttatcgacctgctacaacagtcactgcgtggcgaaccgctcaacctgcgggtgttgattcgccagccgctggtgttcccggaaaccttgccgttgttacctgccctggagcagttccgtaatgcccgcacgcactttgcttttgtggtggatgagtttggctcggtggaagggattgtgacattaagtgacgtcactgaaaccattgccggtaacttaccgaacgaagtggaagagatcgacgcccgccatgatattcagaagaatgcggacggttcctggacggcgaatggtcatatgccgctggaagatctggtgcaatatgtgccgctgccgctggatgaaaaacgtgaatatcacaccattgccgggctgttgatggaatatttacagcgtattccaaaacctggcgaagaagttcaggtgggggattatttgcttaaaacgttgcaggtggaaagccatcgcgtgcagaaggtgcagattattccgctgcataaggatggcgagttggagtacgaggtgtgatggtatcggtcattttacccgatagccgaaaggaataagatgagggaaccgcgccagcggcgatttaccgccgggagcccgggttgccagggtggtggcgattgagccaccctggcacgttcaccggcttgagcgttccatagtagtgaggaacatcaagtgaacggaacagccttcgatcttacatattcagaatataatggtgccgccgcgaacgcctgatgcgacgctttacgcgtcttatcaggcctacaggacaggtcacctggtaacctacatcttctccagcaacttcttcacatctttgccattgcgggaatctttattccgctcggcccagtcattcaggcgacgtttcgcttcgtcctgtagatgtttgcgcagtaactgatccacttgcagactgtaattgagttgctgccagttgccataaacccgcagcggtactggcgtttctttgaggaaatcaatcagtttgctttccccgttccagccacccacgacccgaatatcaaactgggtgtcgcaggtttgatctgccagattcaacatgccttcccctgtcagcgccagcacaggcgattgaccttgcatgtcgtttaacgtcacgacgccatccttcaacgtcaaatcggtggtaaagcggtcaagccgcgtcacgttatcaaagttttcagcggccttcacatcaccgccattacgctctaccgcttgctgaatcatctgctggaagttcatcccttccatgcgcgtgtcggtcattttgacatgtgcctgtccttgccagttgtggcggaatgcgtcggcatctatgtcagcaccggagaaatcaccagccagtgacatttttccggtcaacgaaatcggatagttaaacgccttcagaatggtaccaatctcaacgttttccagccgtggctggaagtttatccgcggatttattgatgtcgcgtccagcgtgcccggcagtgaaacctgtccaccgttaagcttgccctgcagttgagtaatttccagcaaacccgacttgttggtcatttgcgtggcaacatctgtaaaattcattccgcgccagcgcacgttactggcctgcaacaaaatatcagccgtaaagccttgcagtccctgatatgccggttcatcaatacgcgaagaaatgaccgggcgcggcaatgttgattggctctgcccctgctgcgcggcaccgttttcaccattcgctgtttcattaagcgggatgaggttgtcaagattcagttgcgggaattgcagtctcagctgccattcaggtttctctgtcagcgtgacctgtgcttgcccgctcagcgtgctgtcattggcggtcaagctgatttggttaaatgaaaggcgtttatgtgactcctgccactgggcctggaaactcccctgcccctgaataccttgttttggtaaatctgcaccctgcaactgccagttaatttgttcaatagccgccgttaaatcatgcggataatcagaagcatctaccgtaccgttaagggatatcgtgagatcgcgctgatcgcgattaacccgcccggagaactcaaatgagccacgatgttggggatcttgttccatttgcaggcgaatattgcggattgtcacctgctcgtcatcttcatgctggaacaccagcacgctgtccgccaccttaagactggatatatcaaacgaccatccgcgatcgtctgacagatccggcaaggtattgtcgcgcggtgcaaccggagcgtcttcactgcgcaccgcttccgtctgcggcgtcagttgaatcactgccccttttagcatcacctgcttaacgctcagttgatgactcagtagtggtaaaagcgccacgtccagacgcatgttgtcggcgcgaaccagtggctggcttgcgccctgggcggtgagagacattcgcccggagaggatactaagctgcggccagacgtgccaacgcagtggcccgtcgagctgcaattgataaccgctacgtgcagcaacttgcttgaccatatagtcgcggaaatcattcggattcaccagcaacactaacgcagataacccggccaccagcacgaccaggagtatcatcagcgtcgtcagaaatcgtctcatggtatcctcaatgggcctgaattagtctttatcgattcggctggctaccgcgccctgctggttgcgatatttcgcatcttcacggcggttgtaaggtcgcgccgccgggccggaaagcggctcaaagctcagcgcaccaattaacatgcccggacgcagcgccagcggcagcttaccggagttgtagaactccagcacaatgcaaccagaccagcccggatcgatacggtgcgcggtgacgtgcaccatcagccccagacgcgccaaagaggaacgcccgtccagccagcccaccagatcggctggcagcgtcaccgactccagcgtcaccgccagcgccagctctcctgggtgaagatagaacgcctcgccctcgtcgagaacgatctcatcgctcatcacgcggtcaagcgcggcgctcacttcatctttgggaccgctcagatcgataaacgctgccgtgtgaccacggaaggtacgaaatttattgcccaggcgtacatccaccgtcgcgccgttaatacgctccactggcggacgtgggttgatcgacaaacggccttcatcaagccaggcttcaatatctcggtcacacagacgcatggcattttctcctttcgcgcatcactcccttaacgccaattacgtcaagggcataccaggttatcactgaacggtacacaatttatcaagcttattcaaagaactgacttattttcgctttcaatatatcgatcgcgatgcggtttttcccgccgcgcggcacgataatgtccgcatattgtttagaaggctcaatgaattgcaggaacatcgggcgcacggttttttgatattgcgccatcacggaatccattgaacgcccacgctcgttaacgtcacgcttgatgcggcgcatcaggcagatatccagcggggtatcaacgaaaatggagaagttaagttcgtcacgcaaacgcgcatccgtcagcaacaaaatgccttcgagaatgatgaccttcttcggctcaaccgtcaccgtttctttcatacgcgtatgttcaacatagctgtaaaccggcaggtcaattgccgagccgcgtttcaacgcttgtaaatgctcaagcaacaggctgtgatccatcgcgctgggatggtcgtagttggtcttaacgcgttcttccatcgacagatggctttgatctttgtaatagcagtcttcgggaattacgccgatgtgttcatcaccgacttgctcacgtaattcacgataaagggtactggcaataagactcttgccggaagccgatgcgccagcgataccgataatgacgcactgatgagactgatcagtcatatatttagcgacctgattaacctggatgttaggaagggggcgacgaagcgccaaacgcggcaattatagggatttcatccgtctgataccagtcgaatagcgttgccgcgcgctcagagttaattgttgacaaagaattcccggtggcaaattacgttgatcagttttatgtaaggtaaaaaatgttatacgcagttgcgcaaattatccgcctttacgtcactttatgagcaattcgcatataaaatgtaaaacttttgtactagcataaacacagaaacgaatactggcgacctggtcttgcggataaagcggtaatgagcaaacaatcacagcatgtattaattgccctgccccacccgctgcttcacctggtcagtttaggtttagtctcgtttatctttacccttttctcgcttgagctttcgcagtttggcacccaactcgccccactgtggttcccgacgtccatcatgatggtggcgttttatcgccatgccgggcgcatgtggccgggaattgcgctgagctgctcgctgggaaatatcgccgcatccatcctgctttttccaccagctcgctgaacatgacctggacgaccatcaatattgttgaagccgtggtcggggcagtgctgctacgtaaattgctgccgtggtataaccccttgcaaaatctggctgactggctgcgtctggcattcggcagcgccattgttccgcctctgctagggggtgttctggttgtcctgctgacgcccggagacgatcctctcagggcatttttgatatgggtactgtcagaatccatcggcgctctggcactggtgccgctgggattgttatttaaaccacactatctgctgcgccatcgcaacccacggttgctttttgagtcgctgctcacgttagccatcacactgacgttaagctggctttcgatgctgtatctgccgtggccttttactttcattattgtgctgttgatgtggagcgccgtgcgcctgccacgaatggaagcctttttgatcttccttaccacggtgatgatggtgtcgctgatgatggccgcggatccctccctgcttgctacgccgcgtacatacctgatgagccatatgccgtggctaccgtttttgctgatcctgctgcccgccaacatcatgaccatggtgatgtatgcctttcgtgcggaacgcaaacacatttccgaaagcgaaacccgctttcggaacgcgatggaatattccgccatcggcatggcattagtgggcaccgagggacaatggctgcaatccaacaaagcactctgccagtttctcggttacagtcaggaagagctgcgcggactcacctttcagcaactgacctggccggaggatctcaataaagatctccaacaggttgaaaagctggtaagcggtgaaataaacacctattcaatggaaaaacgctactacaaccgtaatggcgatgttgtctgggcgttgcttgccgtctcactggtgcgccacacggatggcacgccgctctattttatcgctcagattgaagacattaacgagctaaaacgcaccgaacaggtcaatcagcaactgatggaacgcatcacgctggctaacgaagcgggcgggattggcatctgggagtgggagttgaagccgaatatttttagctgggataagcggatgttcgagctgtatgaaattcctccgcatatcaaaccgaactggcaggtgtggtacgagtgcgtgctgccggaagatcgccagcatgccgaaaaagtgattcgtgattcgttgcaatcacgctcgccctttaagctggaatttcgcattgccgtgaaagatggcatccgccatatccgcgccctcgccaaccgggtactgaataaagaaggcgaagtcgaacgcctgctcggcattaatatggatatgactgaggttaaacagcttaacgaggcattgtttcaggaaaaagagcgcctgcacattacgctggactccatcggcgaagccgtggtctgtattgatatggcaatgaaaattacctttatgaatccagtggcggagaagatgagcggctggacgcaggaagaagcgttaggtgttccgctcctgacggtgttgcatattacttttggcgacaacggaccattaatggagaacatttacagtgctgacacctcacgttccgcgattgaacaagatgtggtgttgcactgccggagcggcggcagctacgacgtgcattacagtattacgccgttaagtactctggacggcagcaatataggctcggtactggtgattcaggacgtcaccgaatcacgcaaaatgctgcgccagctgagctacagcgcctcccatgatgcactgacgcatctcgccaaccgcgccagttttgagaaacaactacgcatcctgctgcaaacggtaaacagtacacatcagcgacatgccctggtgtttatcgatcttgatcgctttaaagcggtgaatgacagcgccgggcatgcggcgggtgacgctttactgcgcgaactggcgtcgttgatgctgagtatgctgcgctccagcgacgtgctggcgcgactcggtggggatgaatttggtctgctgctaccagactgtaatgttgaaagcgcgcgttttatcgctacacgcattatcagtgccgtgaatgactatcactttatatgggaaggccgtgtgcatcgtgtaggtgccagtgccgggattaccttgattgatgacaacaatcatcaggcggcagaagtgatgtcgcaggctgatatcgcctgttatgcctccaaaaatggtggacggggccgggtgacggtttacgaaccacagcaagctgccgcacatagcgaacgggcggcgatgtcgcttgatgaacagtggcggatgattaaagagaatcagttgatgatgatggcccacggtgtcgcttcgccgcggatcccggaagcgcgtaatttgtggctgatttcgcttaagctctggagttgcgaaggcgagattattgatgaacaaacatttcgtcgtagcttcagcgatccggcacttagccatgctcttgaccgacgggtattccacgaatttttccagctggccgcaaaagcggttgccagtaaaggcataagcatcgccctccccctttccgttgccggtttgagtagcgccacgctggtgaatgatctgcttgagcagctggaaaatagccctctaccaccacggttattacatctgattattccggctgaagcgattttcgatcacgcagaaagcgtgcaaaaactgcggctggcgggatgtcggatagtgctcagtcaggtgggccgcgatctgcaaatcttcaactcgctgaaagcgaatatggcagattacctgctacttgatggtgagttatgcgccaacgtgcagggtaatttgatggatgagatgctgattacgattattcagggcacgctcagcgactcgggatgaaaaccatcgccgggccagtcgttttacccttagtgatggatacgctttctggcatcggcgtcgatctgatttatggtgaggtgattgccgatgcccaaccgctggatttgctggtgaatagtagttatttcgcgattaactgagggagcgtttgcccattgcctgatgcgacgcatcaggcctacaattcgtccgttccgtctggttgccagccttccgtataccagatatgcaacagcgcataagaacgccagggcttccagcgctcggcataacggcggatttgtgccggtgtcatccccggaaatcgctgtttaatcagataatcatccggcagaaaaacatctttcgcctgccagccacgcaaagcgaaataattcgccgtccagcgcccgatacccggaaaagtttgcagcgttttcatcgcctgctccacatcgcccggaattgtcattggtaagctgccctccagcgccgcatttgccagatgaatcagtgcctctgcccgtttcaacggcatgcctaacgcttttaatgcctgcgggtcggctgctgccagccgctgaggcgtggggaagcagatatactccggaaaatcatccagccgttcgccataaagctgtacaactttggcagtcaattttgccgccatcgccacgctcaccagttggcctaaaatcgcccgcacaccctgctcaaaagcatcaatacagccgggtaaacgcaatccgggccgcgccgcgcctaacttgcccaacgcaccgttaacaatctgcgggttacattgcagatcaaacaggcggctcattttcgccagacactcagcggcaacgggttctaaacctgcacttaaatttatgtgcagagtatggcgggctatatccggaatagcagtcaccacgccgcgatattcgcccaccgccagactacgggcataataactgtccgcgaccgtttccacaccgctcactgcacgggcggcgagaaatcccaacatccacgaccagtcatacggcggctgccagttcagggtatacatcgcatctccttattcatccgctttcagcataaacgttattcagacgctacgctttgctttcatattccggttgtcgcgacagcaacatttcgctaaagtcacgccccttcttcaccggcatggggattaattcgtgtttattggttttgattacggtacagcaaactgttcagtggcggtcatgcgtgacggtaaaccgcaattactgaaaatggaaaacgacagcacgctgctgccttcaatgctttgcgcgccaacgcgtgaatcggtaagcgaatggctgtaccgccatcatgatgttccggcagacgacgatgaaacgcaggcgctgttacgtcgggcgattcgttataaccgcgaagaagatattgatgttacggcgaaaagcgtgcagttcggtctttcctcactggcacagtacattgatgatccagaagaagtgtggtttgtgaaatcaccaaaatcgttcctcggtgccagcggcttaaaaccgcagcaggtagcgctgtttgaggatctggtctgcgcaatgatgttgcacattcgccagcaggcgcaggcgcagctgccagaagcgattactcaggcggtgattggtcgcccgatcaacttccaggggctgggcggcgatgaagcaaacgcccaggcgcaagggattctggaacgcgcggcgaagcgtgccggattcagggacgtggtattccagtacgagccggtcgcggctgggctggattacgaagccaccttgcaggaagaaaaacgggtgctggtggtggatatcggcggtggtacgactgactgttcattgctgctgatggggccgcagtggcgttcgcgtctcgatcgtgaagccagcctgctgggtcacagtggttgccgtattggcggtaacgatctggacatcgcactggcgtttaaaaacctgatgccgttactgggcatgggtggcgaaaccgaaaaaggcatcgccctgccgattctgccgtggtggaatgcggttgccatcaacgacgtacctgcgcagagtgatttctacagtagtgccaacggtcgtctgcttaacgatctggtacgcgatgcccgcgaaccggaaaaagtggctctgctacagaaagtctggcgtcagcgtttaagctatcgcctggtgcgtagcgcagaagagtgcaaaattgctctttcaagcgtagcggaaacccgcgcctcactgccgtttatcagcgatgaactggctacgctgattagccagcaagggctggaaagcgccctcagccagccactggcgcggattctggaacaggtgcaactggccctggataacgcccaggaaaaaccggacgttatctacctgaccggcggtagcgcccgttcgccgctgattaaaaaagcgctggcagaacagttgccgggaattccgattgcaggcggcgatgactttggctccgtcaccgccgggctggcacgctgggcggaagtggtgtttcgttaaaagaaaatggctcagcagcggcttaaatctgcctgcgcctgagccagtttttctgccgcctgacgtaaaggttccatcaacggcatggtccgtgctggagcatgaaggcggaatcgctgcaactctgtcgcgccgacagtcaacgtcgattccagccgatgtcgtttggcggtcattttcgccattaccgcttgtctgtctgctggcgttatcgcttcattcggcctgaacacaaaacggcgttcacagctcgctttccagtcgataaccgcctgggtcagatggtcgccaaaccctttcacttgcttaacgccacgacgggtaacatctgcggctgtttcaataccaaaagaccgtaacgccgctttacgcgcagggccaacgccgggaatagaggcaacatcaataaaaaatccctccagaaacttctgcttctgccgttcccttgcagtgtcatgaagtgctgccagagcgcgtttctcttcttccggtaacccgagaatttcgtccttcattttttcgagcatcgtccgtttggcgataaaaccttccaggccgcctacctgctggatctggcggactaaatggtcatagtccattttcgcacgattaaatgcctcacggcgttgctgaacttctgctttgtacgctttgcttgtcagactgccaataatccagatagccgccagcacaggaaccaaaataatataacgcggttctgcctgaaggccgcaaagcagcagcgataatgctgacagtgcgatctcaagcagaatgatgtattcgcgccgtaacaggcctaaaggaagcggcctgccagtcggttggaaatgatcgggtaatggcagttgcaatgctggcggtgctactgacgccatcaccatcgcccagacttttgccagcacaaaatccccgccggtggtaatgacctcttcgccgagatcaataaaatagataacgccttgattatccagcgcacaccacgggcagtcggtcaaatgagcgggataaacatgcattgccgaaacgggacatttctttaactgttggcgcagagaatcaagtgccgctacccacgctttagccgtcggacgcccggttgccacgccactttccgtgaatgcctgctgaaacatggcttcaacatcactcggtaacatcgatagcggaatcgatcgtggcggcggttttaaaccacgtcgctgattatctgacgcgtaggcataacggaaatgggtaatatccgtctccagcgcattacccgcatcagagataagcggcacaccagaataaggatgccggccaccaaacaagacgtgaaaaatcagcaacgcaaggccaaaattatcgtgattttctgtgcgttcaaagccgacaaatgacgacaaggtttgtagctctggcggcgtaaaatgcgacacgccgacttcgcataaatgcagtgtgccattggcgttaatctgaaaggagtcgctatcaatcagtaccactttgctgtcgcgacctaccataaaactgttctggtttacgtcacccacgacgtgcccgtgctcgtgaaccgtagcaaaagatgaagcaatattgcgcgcaacatagagtagaaaatcccacgcacaatgagggtaacgttgacgacgatgtgccgggctatagatcatatgaatcggttctttaccagaaacttttggcatcataaaaccgataacttttccgcctcgtccaccgtgaagcgttgcctgcggccaggcgacataattcaacaattgcgcgtcagctgtcgcagccataaaggcaagtttgtcctgttttaaggcgggtggcggcgtgtgataaatcttggcgacgctatcgacaaactcattgatatcataaaccgcgccttcaccgcctttgcccagttcacggcctggcgtaacgcactcaccagtagcagtatataaagtgggtttcatggtaaccacagcgccagtgccaacgttttatcatcatccgtacgctcgtttaccgccgggctggacaaaaactgctttaacaattcaggtaataaatcgagttgttcctgcgttgctgacgccagtccattgaaaaacggggtaaagaaaggtacatgaggagaattatccagcatatttaacgccagtcgctggataccatccgtaaatgctgcaactttatgcacacgctcagtgctggtgaaagtttccagtctggaaacggcatcttcatcggtaatgaagtgcgtcatattggcatattcacccaccatcggcgtaagcggcaattgcagaccgtgaccaaaatccaccaccacgccgccatcgccaatctgcataatcaaggtgccattagccgatgaaatcaatcccagaaacgtgcaggcaaaatcgcgaactgctaattctttggcttccgcctcggcaaaaagtcgctgacgaacggtcagcacaatatccgtggcgaggatatcattaagccccaattccccaccctgcactttttgcgacatataagccatcgcttcattgacggcgagcgtcgcgccttctcctccctgcgaaacgctacctgcgccatcagcaaggaacatcaccagtaatggctgctggtcatttagccaggcaacctgcatctggcaggcatcctggcaaggcaagtccgcgctgatgtgcgatgttccaacagcggatgcataaaccagacgccagctcacactgacgtccagccttttggcgcttccagcacaacttccgttcccggcgtggagcgggaaaccgaacgcagcgaactggataaccagctaaacagttcacggaattgtaatccttgcagaggcaaaggctgacgaacgctgatttgtgccagcgtcttcatatccgccccctgaacagcgatggaaaagaaggcaaacttcttatcttcttcccccctgaaacactttgttggcggcagcctgccactcatcggttggagcgccatcggtgatcaggaaaatccacgggcgataatacgaaataccatttgcgcggtactcacgtttcctctcttcaaccatatccagggctttggtaatggcggcccccattggcgtatccccctgggcaaacaggatgggcgggaaaaagttagcggcgctggtaaagggttgttccacatgcaccgggccgaacgtcacaatgccgagttccactctttttaaagccagcggatcggcaagcagttcatcacgaaaggtcaccaatccggcgttaagttcattaataggtctgccgctcatcgagccagaaacatccagcagcaaaatgcaggggcaacgtggttccgggttactggcaaaatcgctggtggcaaacgtaatttgttcgctcataagaaatcctttcttagagaattatcgaggtccggtatcataccgactgcaataatgaaataagagcaaacgaagaaactttcagaattaggcccggcggcgcagaaaattttgctattcgcctcgcaagaacggagagccgtcgattgacactaagggcggagtgacataatttcaggagtgagggttagggagaggtttccccctccccctggtgttcttagtaagcctggaagctaatcactaagagtatcaccagtatgatgacgtgcttcatcataaccctttccttattaaaagccctcttctccgggagaggctttcccgtttcagcgtcccgctgaaatcatcggcttacctcctttcgccctgaatgcagtctatcgctaacgcgtgaataaaatagtttcctctgtgattattgcgtaacgactcgcaaagaatatttgctggcaggatcgcagactacaaagcctgcggattgacaatcttatcgtgaaggcatactttcaggagtgagggtagagcggggtttcccccgccctggtagtcttagtaagcggggaagcttatgactaagagcaccacgatgatgagtagcttcatcatgaccctttccttatttaaggccccttcctcgggaggggctttcccgtttcagcgtcccgctgaaatcgtcggcttacctcctttcgccatgcacttagtctatcgctgacttgcagataaaatagtttccagtgtgattattgtgtaacgtctcgcaaagaatttttgctggcaggatcgcagacggcaaagcctgcggattgacaatcttatcgtgaaggcatactttcaggagtgagggtagagcggggtttcccccgccctggtagtcttagtatgctgggtagctaatcactaagagcaccacgatgatgagtagcttcatcatgaccctttccttatttaaggccccttcctcgggaggggctttcccgtttcagcatccggctgaaatctgcggcttacctcctttcgccctgtatgcagtctatcgctaacgcgtagataaaatagtttcctgtgttattactgtatgcgtgctcgcaaatgtgcccgccattcagacgattcccgatagtgtttcataattcctccatttttctcccttattggctggctacactagtatcattccgcgaaacgtttcaggaagagaaactcttaacgatgaaaggcagttataaatcccgttgggtaatcgtaatcgtggtggttatcgccgccatcgccgcattctggttctggcaaggccgcaatgactcccggagtgcagccccaggggcgacgaaacaagcgcagcaatcgccagcgggtggtcgccgtggtatgcgttccggcccattagccccggttcaggcggcgaccgccgtagaacaggcagttccgcgttacctcaccgggcttggcaccattatcgccgctaatactgttacggtgcgcagccgcgtggacggtcaactgatggcgttacatttccaggaaggccagcaggtcaaagcaggcgatttactggcagaaattgaccccagccagttcaaagttgcattagcacaaacccagggccaactggcaaaagataaagccacgcttgctaacgcccgccgtgatctggcgcgttatcagcaactggcaaaaaccaatctcgtctcccgtcaggagctggatgcccaacaggcgctggtcagtgaaaccgaaggcaccattaaggctgatgaagcaagcgtcgccagcgcgcagttgcaactcgactggagccgcatcaccgcaccagtcgatggtcgcgttggtctcaagcaggttgatgttggtaaccaaatctccagtggtgataccaccggaattgtggtgatcacccagacgcatcctatcgatttagtctttaccctgccggaaagcgatatcgctactgtagtgcaggcgcaaaaagccggaaaaccgctggtggtagaagcctgggatcgcaccaattcgaagaaattaagtgaaggcacgctgttaagcctcgataaccaaatcgatgccacaaccggtacgattaaagtgaaagcacgctttaataatcaggatgatgcgctgtttcccaatcagtttgttaacgcgcgcatgttagtcgacaccgaacaaaacgccgtagtgatcccaacagccgccctgcaaatgggcaatgaaggccattttgtctgggtgctgaatagcgaaaacaaggtcagcaaacatctggtgacgccgggcattcaggacagtcagaaagtggtgatccgtgcaggtatttctgcgggcgatcgcgtggtgacagacggcattgatcgcctgaccgaaggggcgaaagtggaagtggtggaagcccagagcgccaccactccggaagagaaagccaccagccgcgaatacgcgaaaaaaggagcacgctcctgatgcaggtgttacccccgagcagcacaggcggcccgtcgcgcctgtttattatgcgtcctgtcgccaccacgctgctgatggtggcgatcttactcgccgggattatcggttatcgcgccctgcccgtttcggcgctgccggaagtggactatccgaccattcaggtggtcacgctctacccaggtgccagcccggatgtcatgacctctgccgttaccgcgccgctcgaacgccagttcgggcagatgtctggcctgaaacagatgtcgtcgcaaagttccggcggtgcgtcagttatcactttgcagttccagctaacattaccgctcgatgtcgccgagcaggaagtgcaggccgcgattaacgctgcgaccaacttgttgccgagcgatctgcctaacccgccggtttacagcaaagtgaacccggcagatccgccgatcatgacgctcgccgtcacctcaaccgccatgccgatgacgcaagtggaagatatggtggaaacccgcgtcgcgcagaaaatctcgcagatttccggcgtcggcctggtgacgctttccggcggtcagcgtccggctgttcgcgtcaaacttaacgctcaggcgattgccgccctcggcctgaccagcgaaaccgtgcgcaccgccattaccggcgctaacgttaactcggcaaaaggtagcctcgacggcccttcccgtgcggtcacgctttccgcgaacgaccagatgcaatccgccgaagagtatcgccagctaatcatcgcctaccagaacggcgcgccaattcgtctgggcgatgtcgcaactgtagagcaaggtgcagaaaacagctggctcggcgcgtgggcgaacaaagaacaggccattgtgatgaatgttcagcgccagcccggtgctaacattatctccaccgccgacagcattcggcagatgctgccacagctcactgagagtctgccgaaatcggtgaaggtgacagtgctttccgatcgcaccaccaatatccgcgcatccgtcgatgatactcagtttgaattgatgatggctatcgcgctggtagtcatgattatctacctgttttgcgcaatattccggcgaccatcattcccggtgttgctgtaccgctgtcgttaatcggcactttcgcggttatggtgtttctcgatttttcaatcaataacctgacactgatggcgttaactatcgccaccggattcgtggtcgatgacgccatcgtggtgatcgaaaacatttcccgctatatcgaaaaaggcgaaaaaccgttggcggcggcgctcaagggcgcaggtgaaatcggctttaccattatctcgctgaccttctcactgattgcggtgttgatcccactgctgtttatgggcgatatcgtcgggcgactgttccgcgaatttgctattacgctggcggtagcgattttgatctcagcggtggtgtcgctgaccctgacaccgatgatgtgcgcgcggatgctcagccaggagtcgttgcgtaaacagaaccgcttctcccgtgcctcggaaaaaatgttcgacaggataatcgccgcctatggtcagggacttgcgaaagtgctgaatcatccgtggctgaccttaagcgtggcactcagcacgctgctgcttagcgtgctgctgtgggtgttcattccgaaaggtttcttcccggtacaggacaacggcattattcagggcactttgcaggcaccgcaatccagctcctttgccaatatggcccagcggcaacgccaggtcgcggacgtgattttgcaggatccagcggtgcaaagtttgacctcatttgttggcgttgatggcactaacccgtcgctgaatagtgcgcgtttgcagatcaacctcaaaccgttggaggaacgtgatgatcgggtgcaaaaagtcatcgcccgtctgcaaacggcggtggataaagtgccgggcgtcgatctcttcctgcaaccaacgcaggacctgaccatcgatactcaggtcagccgcacccagtaccagtttaccttgcaggccacctcactggatgcgctcagtacctgggtgccacagttgatggaaaaactccagcaactgccacagctttctgatgtctccagcgactggcaggacaaagggctggttgcgtatgtcaatgttgatcgcgacagcgccagccgtctggggatcagcatggcggatgtcgataacgccctgtacaacgcgtttggtcagcggctgatttccactatttatactcaggctaaccagtatcgcgtggtgctggagcacaacaccgaaaatactcctggcctcgcggcgctggataccattcgcctgaccagcagcgacggcggcgtggtgccgctaagctcaattgccaaaattgagcagcgttttgcgccgctttccatcaaccatctggatcagttcccggtaacgaccatctcctttaacgtgccggataactattcgctgggcgatgcggtgcaggcgattatggacaccgaaaagacgctgaatctgccggtggatatcaccacgcaatttcagggcagcaccctcgccttccagtcggcgctgggcagcactgtctggctgattgtcgcggcggtggtggcgatgtatatcgtgctcggcattctgtacgagagctttattcacccgatcaccattctctcgacgctacccaccgcaggggtcggcgcgctgctggcattaatgattgccggtagcgaactggatgtgattgcgattatcggcattattttgctgatcggtattgtgaagaagaacgccatcatgatgatcgacttcgcgctggctgctgagcgcgagcaaggcatgtcgccgcgcgatgcaatctaccaggcttgtctgttgcgttttcgtccgatcctgatgaccaccctggcggctctgcttggcgcgctgccgctgatgttgagtaccggggtcggcgcggaactgcgtcgtccgttaggtatcggcatggtcggcggtctgattgtcagccaggtgctgacgctgttcaccacgccggtgatttatctgctgttcgaccgcctggcattgtggaccaaaagtcgctttgctcgccatgaagaggaggcgtaagtgaagttttttgccctcttcatttaccgcccggtggcgacgattttactgtcggtcgccattaccctctgcggcatactgggcttccgtatgctgccggtcgccccgctgccgcaggtcgattttccggtgattatggtcagcgcctcgctgcccggtgcgtcgccggagacaatggcgtcttccgttgccacgccgctggagcgctcacttgggcgcattgccggggttagtgaaatgacctccagtagttcgctcggcagcacgcggattattttgcagtttgattttgaccgggatatcaacggcgcagcgcgtgatgtgcaggcggcgatcaacgctgcacaaagtttgctgcccagtggaatgcccagccgtccgacctatcgcaaagcgaacccgtcggatgcgccaattatgatcctcacgctgacatccgatacttattctcagggtgaactgtacgatttcgcctcgacgcagctggctccgacgatttcgcaaatcgacggtgttggtgatgtcgatgtcggcggcagctcactgcccgccgtacgcgtcgggctgaatccgcaggcgctgtttaatcagggcgtctcgctggacgacgtacgcaccgccatcagcaatgccaacgtgcgtaaaccacagggggcactggaagatggcactcaccgctggcagatccagaccaatgatgagctaaaaaccgccgctgaatatcagccgttgattattcattacaacaacggcggcgcggttcgtctgggtgatgtggcgacggtgactgactcggtgcaggatgtgcgcaacgccgggatgaccaacgccaaaccagctattttgctgatgatccgcaagctgccggaagccaatattatccagacggttgacagcatccgggcaaaattaccggcgttgcaggagaccattccggcggcgattgatctgcaaattgcccaggatcgctcccccaccattcgcgcctcgctggaagaagtcgagcaaacgctgattatctcggtggcgctggtgattctggtggtgtttttattcctgcgctcgggtcgcgccactattattcccgccgttgcggtgccggtttcgctgattggtacgtttgcggcgatgtacctgtgcggattcagtctcaataacctttcgttaatggcgctcaccatcgctactggtttcgtggtggatgacgccatcgtggtgctggaaaacattgcccgtcacctggaagcggggatgaaaccactacaggccgcgctgcaaggtactcgcgaagtcggctttacggtgctgtcgatgagtctgtcactggtggcggtgttcctgccgctgctgttgatgggcggattgccgggccgactgttacgcgagtttgccgtgacgctttctgtcgccattggtatttcgttgctggtttccctgacgctaacgccgatgatgtgtggctggatgctgaaagccagcaagccgcgcgagcaaaagcgactacgtggttttggtcgcatgttggtagccctgcaacaaggctacggcaagtcactgaaatgggtgctcaatcatacccgtctggtgggcgtggtgctgcttggcaccattgcgctgaatatctggctatatatctcgatcccgaaaaccttcttcccggaacaagacaccggcgtgctgatgggcgggatacaggcggatcagagcatttcgtttcaggcgatgcgcggcaaattgcaggatttcatgaaaattatccgtgacgatccggcagtggataatgtcaccggctttaccggcggttcgcgggtgaatagcgggatgatgtttatcaccctcaagccacgcggcgaacgcagcgaaacagcgcagcaaattatcgaccgtctgcgcgtgaagctggcgaaagaaccgggggcgaatctgttcctgatggcggtacaggatattcgcgttggtgggcgtcagtcgaacgccagctaccagtacacgttgttatccgacgacctggcggcactgcgcgaatgggagccgaaaatccgcaaaaaactggcgacgttgccggaactggcggacgtgaactccgatcagcaggataacggcgcggagatgaatctggtttacgaccgcgacaccatggcacggctgggaatcgacgtacaagccgccaacagcctgttaaataacgccttcggtcagcggcaaatctcgaccatttaccagccgatgaaccagtacaaagtggtgatggaagtggatccgcgctatacccaggacatcagcgcgctggaaaaaatgttcgttatcaataacgaaggcaaagcgatcccgctgtcgtatttcgctaaatggcaaccggcgaatgccccactatcggtgaatcatcagggattatcggcggcctcgaccatctcgttcaacctgccgaccgggaaatcgctctcggacgccagtgcggcgatcgatcgcgcaatgacccagcttggcgtgccttcgacagtgcgcggcagttttgccggcacggcgcaggtgttccaggagacgatgaactcgcaggtgatcctgattatcgccgccatcgccacggtgtatatcgtgctgggtatcctttacgagagttacgtacatccgctgacgattctctccaccctgccctcggcgggcgttggtgctctgctggcgctggagctgttcaatgccccgttcagcctaatcgccctgatagggatcatgctattaatcggcatcgtgaagaaaaacgctattatgatggtcgattttgcgcttgaagcccaacggcacggtaacctgacgccgcaggaagctattttccaggcctgtctgctgcgttttcgcccgattatgatgactaccctggcggcgctgtttggtgcgctgccgctggtattgtcgggcggcgacggatcggagttgcgccaacccctggggatcaccattgtcggcggtctggtaatgagccagctcctgacgctgtataccacgccggtggtgtatctctttttcgaccgtctgcggctgcgtttttcgcgtaaacctaaacaaacggtaaccgagtaaatgacagatcttcccgacagcacccgctggcaattgtggattgtggctttcggcttctttatgcagtcgctggacactaccatcgttaacaccgcgcttccctccatggcgcaaagcctcggggaaagcccgctgcatatgcacatggtcattgtctcttatgtgctgaccgtggcggtgatgctgcccgccagcggctggctggcggacaaagtcggcgtgcgcaatattttctttaccgccatcgtgctgtttactctcggttcattgttttgcgcgctttccggcacgctgaacgaactgttgctggcgcgcgcgttacagggcgtgggcggcgcgatgatggtgccagtcggaaggcttacggtgatgaaaattgttccgcgcgaacagtatatggcggcgatgacctttgtcacattgcccggtcaggtcggcccgctattgggtccggcgctcggcggcctgctggtggagtacgcgtcgtggcactggatctttttgatcaacattccggtggggattatcggcgcgatcgccacgctgatgttgatgccgaactataccatgcagacgcggcgtttcgatctctccggctttctgttgctggcggttggcatggcggtattaaccctggcgctggacggcagtaaaggtacaggtttatcgccgctggcgattgctggcctggtcgcagttggcgtggtggcactggtgctttatctgctgcacgccagaaataacaaccgcgccctgttcagtctgaaactgttccgcactcgtaccttttcgctgggcctggcggggagctttgccggacgtattggcagtggcatgttgccctttatgacaccggttttcctgcaaattggcctcggtttctcgccgtttcatgccggactgatgatgatcccgatggtgcttggcagcatggggatgaagcgaattgtggtacaggtggtgaatcgctttggttatcgtcgggtactggtagcgaccacgctgggtctgtcgctggtcaccctgttgtttatgactaccgctctgttgggctggtactacgttttgccgttcgtcctgtttttacaagggatggtcaactcgacccgtttctcctccatgaacaccctgacgctgaaagatctcccggacaatctggcgagcagcggcaacagtctgctgtcaatgattatgcaattgtcgatgagtatcggcgtcaccatcgccgggctgttgctgggactttttggttcgcagcatgtcagcatcgacagcggcaccacacaaaccgtctttatgtacacttggcttagcatggcgttgatcatcgcccttccggcgttcatctttgccagagtgccgaacgatacgcatcaaaatgtagctatttcgcggcgaaaaaggagcgcgcaatgaagttctggcgacccggtattaccggcaaactgtttctggcgattttcgccacctgcattgtcttgctgatcagtatgcactgggcggtgcgtatcagttttgagcgtggctttattgattacatcaagcatggtaatgaacagcgattacaactgttaagtgatgcgcttggcgagcagtatgcgcagcatggcaactggcgcttcctgcgcaacaatgatcgctttgtctttcagatcctgcgttcatttgaacacgataattcggaagataaacccggcccgggtatgccaccgcacggctggcgtacccagttctgggtggttgatcaaaacaacaaagtgctggttggtccgcgagcgccgattccacctgacggtacacggcgacccattctggtcaacggtgcggaagttggcgcggtgatcgcctcccccgttgagcggttaacgcgcaatactgatatcaatttcgataaacaacagcggcaaaccagctggttgattgtcgctctggcaacgttactcgcggcgctcgccacctttctgctggcgcgtggtctgttggccccggtcaaacggctggtggacggcacgcacaaactggcggcgggcgatttcactacccgcgtaacgcccaccagtgaagatgaactgggcaaactggcgcaagacttcaaccagctcgccagcacgctggagaaaaaccagcaaatgcggcgcgattttatggctgatatttctcacgaactgcgtacgccattagcggtgctgcgcggtgaactggaagccattcaggatggcgtgcgtaaattcacgccggagacggtggcgtctttacaggcggaggtcggtacactgaccaaactggttgacgatcttcatcagttgtcgatgtctgatgaaggcgctctcgcctatcaaaaagcaccggtagatttgatcccactgctggaagtggcgggcggcgcatttcgcgaacgatttgccagccgtggcctgaaactgcaattttccctgccagacagtattaccgtatttggcgatcgcgaccgtttaatgcagttattcaataacttacttgaaaacagcctgcgctacactgacagcggcggcagcctgaaaatctctgccgagcagcacgacaaaacggtgcgcctgacctttgccgacagtgcgccaggtgtcagtgacgatcagctacaaaaattgtttgaacgtttttatcgcaccgaaggttcccgcaaccgcgccagcggcggttccgggctggggctggcgatttgcctgaacattgttgaagcacataatggccgcattattgctgcccattcgccttttggcggggtaagcattacagtagagttaccgctggaacgggatttacagagagaagtatgaccgagttaccaatcgacgaaaacacaccgcgtattttgatcgtggaagatgaaccgaagctgggacagttgctcattgattatctgcgtgctgcgagctatgcgccgacgcttatcagccacggcgatcaggtactgccgtatgtgcgccagacaccaccggatctgatcctgttagatctgatgctccctggcaccgatggcctgacgctgtgccgggaaattcgtcgtttttctgacattccgatcgtgatggtgacggcaaaaatcgaagagatcgatcgcctgctggggctggagattggcgcagatgattatatctgtaagccgtacagcccacgggaagtggtagcgcgcgtcaaaaccattttgcgccgttgcaaaccgcagcgcgagttgcagcaacaggatgctgaaagcccgttgattatcgacgaaggtcgttttcaggcttcatggcgcggtaaaatgcttgacctgacgcctgcggaatttcgtctgctgaaaacgctctctcatgaaccaggaaaagtgttctcccgcgagcatttgctcaatcatctttatgacgactaccgcgtagtaaccgaccgcaccatcgacagccacattaaaaacctgcgccgcaagctggaatctctcgacgccgaacagtcatttatccgcgccgtttacggcgttggttaccgctgggaagccgacgcctgccgcatcgtttagttttagcgacatgactttgttagccggagatggcgttcagaccagatccggcaacattatcccacgcatggtcagcaaactgacattatctctccgccctggcaggcatcagaaaatcgctcatactttaatcggtaaacagcacctttagatgctgttttcgatacgcaatttcaatcaaggagtcattatggctggttggtttgaactcagtaagagcagtgataatcagttccggtttgtgctaaaagcgggcaatggtgagactatcctcaccagcgagctgtatacctcaaaagcctctgcggaaaagggcatcgcgtcggtgcgtagcaacagcccgcaagaagaacgctatgagaaaaaaacggcaagtaacggcaaattctatttcaatctgaaagccgctaatcatcaaattatcggctccagccagatgtacgccaccgcgcaatctcgtgaaaccggaattgcctccgttaaagccaatggcacaagccagacggtgaaagacaatacgtaattacgatgccgggcgtgggttgttggcgtccggctttatatccaaataacgcttagttattaataattaagagtaaccgccgccattaaaatagtgggcactgacgagcactcgttgtgctttctttgtttaccatcccatacttatcctcctgaacatgttcatgtgccaaaatatcttctaatactttcgtgacgctatccggtttatgacatacactgatgtaagatttttacttacaggcgggcgtaaaatggccagaacgatgacggttgatctcggcgatgagttgcgtgaatttatcgagtccttaattgaatccggcgactatcgcacccaaagcgaagtgatccgtgagtcactgcgattacttcgagaaaagcaagcagagtctcgcctgcaagcgttacgtgacatgctcgcagaagggttgagtagtggtgaagctcagccgtgggaaaaggacgcgttcttacggaaggtgaaagcagggataaggaaataatgtgcgtattattaaactcatgccaaaagccaatgaggatttagaaggcatctggtattacagctatcaccatttcggcgaaccacaagccgacagatatgtggaacatctttcagacgttctccagattctgagtaacaataatataggtacgcccagacctgaattaggcgaaggtatttttgttcttccttttgaacgccacgtcatttatttcctgcaatcaccaggggaaattatcgtcattcgtatccttaaccaaaaccaggacgccaccagacatttacactggagctaaacccgccgattgcgctacaatgcccgcccttaaagtgggggcactcccctaaccgcttcatcaggtgaagcggatctgacctgtcatcagaacgagagaattatgtttaaaccggaactcctttccccggcgggaacgctgaaaaatatgcgttacgctttcgcttatggcgcagatgctgtttatgcgggccagccgcgttattccctgcgtgtgcgcaacaacgaattcaaccacgaaaatcttcagctcggcatcaatgaagcccacgcgctggggaaaaagttttatgtcgtggtcaacattgcaccgcacaacgccaagctgaaaacctttatccgtgacctgaaaccggtggtggaaatggggccggatgcgctgattatgtccgatccagggctgattatgctggtgcgtgagcacttccctgaaatgccgatccacctttcggtgcaggctaacgccgtgaactgggcgacggtgaaattctggcagcaaatgggcctgacccgcgtgatcctctctcgcgagctgtcgctggaagagattgaagagatccgcaatcaggtgccggatatggagatcgagatcttcgttcacggcgcgctgtgcatggcctactccggtcgctgcctgctctctggctatatcaacaagcgcgacccgaaccagggcacctgcaccaacgcctgccgctgggagtacaacgtccaggaagggaaagaagatgatgttggcaacatcgtacacaagtacgagccgattccggtgcaaaatgttgagccgacgctgggtatcggcgcaccaaccgacaaagtgtttatgatcgaagaggcccagcgtccgggcgagtatatgaccgcgtttgaagatgagcacggcacttacatcatgaactcgaaagatctgcgcgccatcgcccatgtagaacgcctgaccaaaatgggcgtgcattcgctgaaaatcgaaggtcgtaccaaatctttctactattgtgcacgcaccgcacaggtttaccgcaaagctatcgatgacgccgctgcgggaaaaccgttcgataccagcctgctggaaactctggaaggtctggcgcatcgtggctataccgaaggtttcctgcgtcgtcatactcacgacgattatcagaactacgaatacggttattcagtttctgaccgccagcagtttgttggtgagtttaccggtgagcgcaagggggacctcgcggcggtagcggtgaaaaataaattctccgttggcgacagccttgagctgatgacgccgcaaggcaacattaattttacccttgagcacatggaaaacgccaaaggcgaagctatgccgatagcaccaggcgatggttatactgtgtggctcccggtcccgcaggatcttgagctcaattacgcgctgctgatgcgtaatttctccggggaaaccacgcgtaatccccacggtaagtgattaatttcgattatttttcccggatggaaaattcttagaaaccgatcacatacagctgtatttattaaggttatcatccgtttcgctgaaaaacataacccataaaatgctagctgtaccaggaaccacctccttagcctgtgtaatctcccttacacgggcttatttttatgcataagccctatccctggtcaccgtcttccattgaccacatcgatagaatctcccttcatagcacgatgcctttcacgtaacggcatcgtgctcgcacaggttccggctaagcacaaccagaacgcgcatgtttgacgcttaccaaaaaatattctcactctccacatttgaatgtcagacgagcgacgccatgtaatcctgcaccttctgtcttcaggtcaactatctgcattttttgccctgagtaacacagaaatgggctgcatcattttttactatattttctgcaccagatattctgcccctggctaaagaagcttcggcttcggtgtagtattggttatcgagtttacgctgaatattacttttatatgcaagaccaaatttaccgatacttgtctcatcattatgcacagcacaaccagacataataaaaatactaattaatgatatagcagctatctttttcatctcaccttccccattaaataccaacgacactctctagtgtttaaatataataatggcatgattattataattgaataggattataataaatgttctgtacaacatttcctacataagtaggaattacggacattgaggcccttcagggtaactccatgggggctttaatatatttggaatagtatatttaagatgccactgtttggttgaatattaggcatatgctcttttttgaaatttatcggtggcagccgttagtattcgctgtccccattgcaagctcctggtggtaaccactgaatcctccatacttgaactgactttttatcctccgactttcatcctgttctgactccaccttttgttttctgctctacactatctacagaccaatcataaaggcacatacgatcatggcagaatttcccgccagcttactgattcttaatggcaaaagtactgacaatctacccttgcgcgaagcaattatgctgttgcgtgaggaaggaatgacgatccatgtgcgggtcacctgggagaaaggcgatgccgcacgatatgtagaggaggcccggaagttgggcgtcgcaacggtgattgccggtggtggcgatggcaccattaatgaagtttctacggcgttgattcagtgtgagggggatgacatacccgcgctgggaattttgccattaggaaccgccaatgattttgccaccagtgtagggattcctgaggcactggataaggcgctgaaactggcaattgccggtaacgccattgcgatagatatggcgcaggtcaacaaacaaacctgttttattaatatggcgacaggcggatttgggacgcgtattaccacagaaacgccggaaaaattaaaagccgcgctgggtggcgtctcttacatcattcatggcttaatgcgcatggatactctgcaaccggaccgttgtgaaatccgcggtgaaaactttcactggcaaggtgacgccctggtcattggtattggtaacgggcgtcaggccggtggcggtcagcaattgtgtccgaacgcgttaattaacgatggcttgctgcaactgcgcatttttaccggcgatgaaattcttccggctctcgtatcaaccttaaaatctgacgaagataacccgaatattatcgaaggcgcttcgtcgtggtttgatatacaagccccacacgaaatcacttttaatcttgatggcgaaccgttgagcggacaaaactttcatattgaaatacttccggcggcgttgcgttgtcgattaccaccagattgtccattattgcgttaatcaaactattctctcttgaaccagggagaatccgaaatgccggatgcagtgtaaataccttatccggcatacagaacaatactacaccgtaattaattttacccgtgtcttctgcaatgccagtttatccacctcagacacagcatcatcggtaataataatgtcaattttttcgattggcagtacctgattaaaaccgcgacggttaaatttcgatgaatcgagaacggcaatcactttattagcggcggtgaccatcgccccgctaatcgaataaccttcattaaaggtcgtaataccattaaccgcatcaataccatcagcaccgacaaacattaaatcggcattaatatcctgcaatgaacgctcggcaatggaaccatgcatcgagcgcgttttatggcggaccgtgccaccgcagacgaccagagtaatgtctttattttcggaaagggcaaacgctgccgggagactgttggtaatcaccgtgatatttttggcggtcattaatccttcggcgataagcatcgtcgtacttccgctgtcgagaataacggtcatcccttcgtggatcattttgactgccgcctgcgctattctgttttttggcgcgctggcgagctgaaatcgctctttaaacccgacttcctgggtctcggtttcactattaccggacattattttcgccgcaccgccatgaaagcgcgtaaccacgcctttttgttcgagaaagcgcaaatcggcacggattgtcgcttccgaggcagcaaatactcccgccagatcctgaacaagcacggttccctgttcattcactaattggatgatcttattccttcgctcgaatgaattcatcgtcatttacccatattcaattgtggctagtgtaaacgaagggggaccattggtgaatgatctgttttgcacaataccgggccagcatcacgctggcccgcggtttcatggaatgagcaacactttgcccggcatggcattacgagcgatgtcacgcaccgcctgggtgaagctttcaaagcttccacggtgagcgattaatggctccaggcttaacttacgttctgtcagcaaccggctcgccgtttcccactcctgccccggccaagggctggaatagttcatccaactgccgataaccgtcagctctttacgcaatattttgccaaacgttgccgatgttaaatgcagatcctgatgcaacgtgcccaccagcgccagttgggcatgaggaccggcaatctctaccgccagttcgacagtttgcggtacgccagccgtctcgaggataagctgattaaaacgcagttcgcgtaaaacgctctgcatttgcggcgcgcccatttcgctactgttaaatgtttgcatcgcaccgaaagattttgccagtgccagtttttctgagctaatgtcgatagccgtcacactctttgctcccagcgcgacagcgcactgaatagccagcaggccaatggttccggcaccaataataataacgtttttattctcacaaccttgcgctaaatgaaaagcatgcagaccaacggtaatcggctcaataaaagccccatcctcaataggcatatccgtgggtagagcaaagacattttttcgcttaacgacaatatattcagcaaatccaccatcacgccgcgagccaataaaatcatattttgcgcactgggaataaaaccctttcagacactctggacaagtaaaacagggtaataacggcacacaggcaaccgcatcgtcagggtgtaaatcatcaacaccggatcccaccgcatcaatatagccgctaaattcatggcctaacgttattggataataatgtgcaccatttttaaatatcctggataaatcggaaccacataagcccgagctggcaatttttacccgcacctcatcctgatgtttaatttcaggaatgacgctttctgcaacgcgcacgataccatcagtatcattcaccactgatttcataaaaactcctgattgttaagggggataacctccccctcaggtaaaaattattctgcgagaacgactttctcttgtttaataaagccacgcgctctacgccaggtcatgaaaataccggtcagataaattgcaccgataataatgaaaccgggaatattttgcggggagaaaacctgaatcagtaaccaggtaatgggagaaccgccctgatccattgaagccaccatacccccggcttttaacgccccagcattagccgccagttgggtgtgcaaaccaatagtttgcgtcgcgatccacagggtgatgctcataatgatgacacccgagattaaggtgcggaacagatttccacgatgcacggcgaccgccatcgccacgaagaagccgatggtggcaagatcgccaaacggcagcacctgattacccggcacacaaacagcaattaaaatggtaagtgggataaaaatcaggcttgccgataccaccgccgtatgtcccagcagcaacgccggatcaaggccaatcaggaactcctgaccgccgaacttcgcctgtaaacgactacgagcctgcttagcgatgggcgttaaaccatccatgatgggtttaatcacccgtggcattagcagcatcactgccgccgtttttaccgccagctgcaatacacctttgacatcgtaacccgcgaggatgccgataatcagccccatcacaaaacccacggtgacaggctcgccaaatggaccaaatttgcgctgaatatcgtcggcgctaaatttaattcggttaacgtctgggattttctcgatgatagcatcgaccagcaccgcaatcggccccatatacgccgacgtaccgtgcggaatagcaataccttccagctcaaagaaatttcgggtatcgcgggcaaaccagtcgccgagcttataaacaaacgccgcgtgaattacgacacctgccatccctatcatccatgaaccggttgccagatgcagcaacgcgccggtgaaggtcatatgccagatattccagatatcaacatttaccacccgcgtcatacgggtcagtaacatcgccacgttaaccagaatcgcaatcggaatcgccaccagcgcaatttgcgaagcccaggtcattggtgaagagcccggccagccgacatcgaccacatgcagattcaggtcgaaattttccgccatcgctttcgccgccggaccaatggaatccagcattaagccaatcacaaggccaatgccaacaaagccaatcccgatatgcagacccgctttaaagcaatcgcctgccttcatgcctaatattttagaaaaaataatgatgacaatcggaagcatcaccgtagggccgaggtcgagaatataacgcatgacttctgaaaacataggtcacccctgtaagatagtcagaattttattttgtaatgcttcgataccgacaccagaaataaaaggcatgccgtgaactaacggaatatcgccaaaactacgatccactttggcagtggtgcatatcaaatgcacaccatccatataggtttctatttcattaacccgacactggattaattcaacaggaatattatgattctgacacaactctttaatttcttccgccgccatcgtagaggtcgcaaccgcgcctccgcaagcgacaataatcttgcgtttcataaatagtcctttttattgttacagagagatttattcgtctgaatctaaaacatactttgtgaagtattcctttaactgggtttcaggaagagtgattagtgtctcgacgatatcgggctgttgtaacttgccaaataaacagcgtaaaagtttcaattgctgctgcggattttccacaatcaacgcaataaccaacgatacctccacgtcgttatcatcatccgcttgctgaaaatgaactttatttgttggccttaacagataaatggctgacgacttagcatgaatcgcctcacaatgcggtattgcaatggcgtgctgctcaagcattatcccggtagggaattctgcttctctggcaattaatgcctgtggccaggtatcatgaaccacacctttggcgagcatctcattaccgatatgggttaaaacttcgctacgatcgacaaaagaaattccgctacgaacaaacaggttagtcatataccgtccttattccgcacagccgtagcgataggcgcgcaaaacatcataaattttatccataatcagctgatgcggtattgctgataattccccggactgaatgcgttcaaattgtttgggaagatactgactaatcatgcccagtgggatgtccacgccttgcagattcaccatcatcgtttcgacgctatttttaatccgactatgcggccagtaataacgaatacgatccgacaggctgtaacgaatatccagtaatgaatcgttaaaacccgtacgataatattttttccagtattgcggttcgtcgagcatcacttcttcaattaccgccaggcaaccgctgcgattttcgggggcgataagttcctgctcaatttgtgccagtgcaaatatcgcctcgcgtaaagcaaaggttaatgcgggaccgactttcaatattgcaaagtgatcgcggactaattcccaataagccgtccgggtctggtaatcggtagaatgtgcttcataaaccattcgggtattttctatccattgcgccagcgcctgcgcttcctgcggctgataatggataatattgctgtgatcaaattccacacccggctgcaccacgatggcaatcacgcgtgttaacgcctctgtcagcccacgggcaataaaggccttttgatgcgtacgtaaagtattggcggcatcttcaacatgggtgatgtgtactgactgaatggcgctggcctcaccgcccggaaccggaacttcggtgccaatgacatagctcagttgctcacgctggcaatctgtcgccacactttccgcagcaaagcacagcagctcgttccgcaaccgtttctggtgctaacggtatgggatcccccgcgcaggacattgacgcatcaagatgaattttactgaagccagcacgaacatatgcctttaccagctcgacggatttttccatcgccgcatccacattttcttgctgccagcagtttggccccagatggtcaccgccgagaataatgcgctcgcgcgcaaatccgactctatcggcaatcgtaaaaacaaattcgcgaaagtctgccggtgtcattccggtataaccgccaaattgattgacctggtttgacgttgcttcaatcagcactttgcgcgtgctgttgcgatcaaatgccagcgccgcttcgataaccaacggatgggcagaacagactgaacatatgccgatatgttcaccagctttatgccgggcaattaacgttttcatattttttccttgttaaatggcaggtgcgttatgccctgccctcgcagccacaatcggcaatcactttgctcaccacatcgcgcattgcggatttagccgactgcaaataatcccggggatcggtcgcttcggggtgctcggtcaggtaattttttaacgcctgcgagaaggcatttttcagctccgttgcaacgttgattttgcatatccccagtttgatggtttgctgaatatccttagtcgataaccctgacgcgccatgcagcaccagcggtaagttcacccactggcgaatgttctccagtcgagaaaaatcaagcgccggtgcgctggcatacataccatgagccgtgccgatggctaccgccagggaatcaattccggttgcctcggcaaattcacgcgcctgagcggggttggtataaaaagcatcggcttcattgacttgcacatcatcttcctggccgccaagttgcccagctccgcttcgacgctgacatcaaagcgatggcaaaaatccaccacctctttgacccgtgaaatattttgcgcaaaaggcaaatgcgaggcgtcaatcatgactgagcgcacgccagaacgaaccttctgagcgatatcgtcaaatttcgtgtgatggtctagatgaattgccagtggatggtgatattgcttcgccatcgcgctgaccagcgccaacagattttctgtaccagcatgagtaaatgtgccaggcgttccggcgatgatgaccggcgcatgcaggttggcagcggtttctaccaccacttgcatcgtttcgagattgtgaatattgaatgccggaaccgcataaccgccgcgctgtgcgttgttcagcatctgctttgtcgataccacgcacattttcatatcctgtcgtttgttttcgatttcaaaatataatgaaatgatttgtttttaaatgtcgagataacgatcacaaaaacgacaatgtgaaaattgttcgaggagtaaaaggcaaaaaaaaacggcctcccgatagggaagccgtagcaaagtgcgcgtgtttttatgccggatgcggtgtaaacatacgtggcagtgctatgtaggcatgataagacgcttccgcgtcgcatcaggcataggttgccggatgcagtgtaaacgccttatccgtcctacggggtggtgctgttcgtatgaggcgtatcaggcaatagtaattttgctatcgagataaacgtcctgcacggcattaatcagtttcacgccgtcagccatcgatttcttgaacgccttacgtccaagaatcagcccattccgccagcgcgtttgttgataaccgcagtacgcactgcatcgctgaggtcagtttcaccgcccgcagcaccgccggagtttatcaacccagcccgacccatatagcagttagctaactgataacgcaccagatcaatcgggttttcgctggtcaatttgctgtaaacacgatcgtcggtgtaaccgtaattaattgctttatagccgccgttattttccgccattttttgtttgacgatatctgcaccgatggttgccgccagatggtttgcctgaccggtcaggtcggcggaaacatggtaatcaacgccatctttcttaaaggcggagttacgcaaataggcccacagcactgtcaccatacccagctcgtgcgcacgttcaaaagccgcagaaatttcttcaatctggcgacgtgactcttccgagccaaaatagatagtcgcaccaaccgcaaccgcgcccatgttgaacgcctgctccacgctggcatacagcgtttgatcgtaggtattcgggtaacttagcgtctcgttgtgattaagtttgacgaggaatggaatgcgatgcgcataacgccgcgataccgacgccagcacgccgtaagttgacgccacacagttacagcccgcttcgatcgccagttcaacaatgtttttcgggtcaaagtagagcgggctagcagcaaatgaagctccggcagagtgctcaacgccctggtcaaccggcagaatagaaagatatcctgtgccagccagacgcccggtgttgtacaacgtctgcatattacgtaacaccgctggcgggcgattattgtcaatcattacgcggtctacgtagtcatgtccggggagataaagctggtcagaaggaattgtcatacaacggtgctgtaaaaggttgtcggcgtctttgccaagcaactgcgcaatatctgtcattactatgctcccgtaaattccgattggatatcggctatggattgtcctggtccgccttttgcgggcaatcataatcctggtcgttacgggcgagtttttccatcttttggatgttttttcagcgttttctgttggctcgattcatcagaaaaaatgttagcgcggtcaagttttcaccgtaaaggtatttaaaaggtattattaagtggtattgtcatcgcgtaccttacattacctgtcatgaaggaattaaaagatgaaaacaacagcaaagctgtcgttcatgatgtttgttgaatggtttatctggggcgcgtggtttgtgccattgtggttgtggttaagtaaaagcggttttagtgccggagaaattggctggtcgtatgcctgtaccgccattgcggcgatcctgtcgccaattctggttggctccatcactgaccgctttttctcggcgcaaaaagtgctggcggtattgatgttcgcaggcgcgctgctgatgtatttcgctgcgcaacagaccacttttgccgggttctttccgttactgctggcttactctctaacctatatgccgaccattgcgctgactaacagcatcgcttttgccaacgtgccggatgtggagcgtgatttcccgcgcattcgtgtgatgggcactatcggctggattgcctccggtctggcatgtggtttcttgccgcaaatactggggtatgccgatatctcaccgactaacatcccgctgctgattaccgccggaagttctgctctgctcggtgtgtttgcgtttttcctgcccgacacgccaccaaaaagcaccggcaaaatggatattaaagtcatgctcggcctggatgcgctgatcctgctgcgcgataaaaacttcctcgtctttttcttctgttcattcctgtttgcgatgccactggcgttctattacatctttgccaacggttatctgaccgaagtcggcatgaaaaatgccaccggctggatgacgctcggccagttctctgaaatattctttatgctggcattaccgtttttcactaaacgctttggtatcaaaaaggtattattgcttggtctggtcaccgctgcgatccgctatggcttctttatttacggtagtgcggatgaatatttcacctacgcgttactgttcctcggtattttgcttcacggcgtaagttacgatttttactacgttaccgcttacatctatgtcgataaaaaagcccccgtgcatatgcgtaccgccgcgcaggggctgatcacgctctgctgccagggcttcggcagtttgctcggctatcgtcttggcggtgtgatgatggaaaagatgttcgcttatcaggaaccggtaaacggactgactttcaactggtccgggatgtggacttttggcgcggtgatgattgccattatcgccgtgctgttcatgatttttttccgcgaatccgacaacgaaattacggctatcaaggtcgatgatcgcgatattgcgttgacacaaggggaagttaaatgaaaaaagaacgtattctcggtgctctttatgggcaggcgttaggggatgcgatggggatgccctccgagctttggccacgcagccgcgttaaagcacactttggctggattgaccgttttcttcctggaccaaaggagaataacgcggcctgttattttaaccgcgccgaattcaccgacgatacctcgatggcgctgtgtctggcggatgcgttactggaacgtgaaggcaagatcgatccgaatctgattgggcgtaatattctcgactgggcgctgcgtttcgacgcctttaacaaaaacgtacttggtccgacctcgaagattgcgcttaacgccattcgcgacggtaaacccattgctgaactggaaaacaacggcgtgaccaacggcgcagcgatgcgcgtctcgccattaggttgtttgcttccggcgcacgatgttgattcctttattgatgatgtggcgctggcgtccagcccgacccataaatccgatctggcggttgcaggcgcggtagtcatcgcatgggcgatttctcgtgccattgacggagaaagctggtcagcgattgtagattcactgccttcaattgcgcgacatgcccagcaaaaacgcatcactaccttcagcgcctcactggcggcgcggctggagattgcgctgaaaattgtgcgcaatgccgacggcaccgaatccgccagcgaacagctttaccaggtcgttggcgcaggtaccagcactattgagtccgttccgtgcgccattgcgctggttgaactggcacaaaccgacccgaatcgctgcgccgtcctgtgcgctaaccttggcggcgacacagacaccatcggtgctatggcgacggcaatttgcggcgcgttgcatagcgttaacgctatcgatcctgcgttaaaggcggaactggatgcggtaaatcagcttgatttcaaccgctatgccacagcgctggcgaaatatcgtcaacaacgggaggcggtatgagcggcgctcgattacacacgctgatgcctgaattaaccacgcgtcagccggtgatggtcgtcggcgcggcggtcattgacgtgatcgccgacgcttatgccctcccctggcgtgggtgcgatatcgaactgaaacagcagagcgttaacgttggcggctgcgcactgaatattgccgtggcgttaaagcgcctcggcatcgaagcgggtaatgccttgccgctcggtcagggcgtgtgggcggagattattcgcaaccggatggcaaaagagggcttaatcagcctgatcgataacgccgaaggtgataacggctggtgtctggcgctggttgagccggatggcgaacgcacttttatgtcattcagcggtgtggaaaatcagtggaatcgccagtggctggcgcgattaaccgttgcgcctggcagcctgctctatttttccggttatcaactggcctcgccctgcggcgaattgttagtggaatggctggaagagctgcaagacgtgacgccgtttatcgattttggcccacgtattggcgatatcccggatgcattactggcgcggatcatggcctgtcgacctttagtgtcgctcaatcgtcaagaggctgagactgccgccgaacgttttgctttatccgcagagataacaacacttggcaagcaatggcaggagaaatttgccgcgccgttgatcgttcgtctcgataaagaaggcgcatggtatttcagcaacgacgcttctggctgcattccggcatttccaacgcaagttgtagacaccattggggcgggcgacagtcatgcaggtggcgtacttgccgggctggcctctggtctgccactggcggatgccgtattactgggcaatgcagtggcgtcgtgggttgtcgggcatcggggcggtgattgtgcgccaacgcgcgaggaactactcctcgcacacaaaaacgtatagatcgctgcgacagtggctaatgctgtactcaataggccgttgctgttggtcaagcgccacttgcttgatcaccagcaccggtattttgctatctaactgaatatgtgactgaaactcggcatccggcatccgggcgctaacgcgggaacgcgtacgttgtgggtaaatgtgctggctgcggaaatagtcataaagtgaaatcccgatggcatcaacatcatgaattaaatgcgccggaacccacgattcctcaatcgataccgcttcttcatcgacatagcgaatacgcttaagcaaaaagacatcacttcctgcttcgaccgccagctgctgcgcgacttcttcgggacatttcacgacacgcttgttaacccatagcgtatcgggctttttcccgcgcaataccacctgctgagaaaaacctcgcgcttctttcaacgagtattcgaagatgttgttgatctgcgtgccgtaaccgcgcgaacgcgtcaccacaccctcttcttccagcgcctgcatcgccttgcgcaccgtaatgcgcgaaacgccggttaactgacttaaatcacgctcaccgggcaaaatattgccatgctccagcaccccgctgcgcacggcattttttaccgtttcggcaaacttaatataaagcggcgtgttatccgccgctaaaatacgctcgttcagttgggcaatcagctgggtatgcgcttgttccatttgtctttttcctgccgaggagtctggtgggagtatatcactgcttcttatttaaggcgtttctttaatcccatcaacgaatgcctgcaactcctccaccgtgccatgaaatacattaaaatccaccggaccattgatgccatctacctgtccacggtcggaatgctgccagaagcgccaggccatgccgtcattgtccggacgacgttgataatagtgagccacccaccacggatattcattgaaatagcccgccagattggtgtgataaaaaacggctcctgagtaaataatcggcttttttcccgtacttttttcgaccatttttagccactgacttactcgtttgcgtaattcttttgccgataattttccccgttcttctacgtccagtaccgcagggaaatcgccttgtgagaaatccaccgtttgcagaaataatcgtgcctgaaccggcgctgctaccgacggggagaaataatgatacgccccgcgcagcaggccattttcgcggcttagttgccagttacgcgaaaaatacgggtccaccagcttttcgccttccgtcgccttaataaaagcaaactgtaagcggataccgttgtcgcgcatttttgccacccgctgccagtcgatccgctcctgccagcgagaaacatctattccgtgaatggtgtaactggcaggaatgcgaatagcgaaagatttaaccgggcgataaccgtagaaatggatgtagtctgtaatctgaactgctgtcgaatagaaaaattcaccgtctgacgcggataaattgcaacgatggaaattagcccaagagcgcataatagagaggtgagttttttcgactggtaattcttagctgcattggtttcatccctgaatgtcagtgccaaaggctgacaataaccaaagcagctatagtacggtgctcaccaccaggcgtggaagtggtgaaccggaccaataccgtgaccaacttccagcgtgtcggcctgggctaatgctgatgaaagccagctttttgcctcctgtacggtgtcagcccagtttgtatggcgcgggcgtagtgcagccaacgccgcagagagcgtacaaccagtgccgtgggtgtttttggtcataatgcgcggtgcggtaaaccgttgttcaccctcgcgggtaaacagccagtccgggctttgctcatcatccagatgaccacctttcattagcactgcgccacagcccatcgccaacagcgatcgcccttgttccagcatttcctgttcggtgcgcgcgtgtggcgcgtcgagcaaggcggcagcttcgggcaagtttggcgttattaatgaaacctgtggcaataatcgactgcgcagcgtagcaaccgccgaaggtgaaagcagcgggtcgccgctttttgccagcataacggtgtcgagtaccacgttttggatctgataacgttgcaaccgttctgccaccgcttcaacaatatcggtttccgccaacataccgattttagtggtgtcgattcgcacatcgctgaacaccgaatcgagctgggcggcgacaaaatcaggctcaatgcgatacaccgactgtacgccacgggtattttgcgccaccagtgcagtaataactgagcaaccataagcgccaagtgccgagaaggttttaagatcggcctgaatccccgcaccaccactgggatcagtaccggcaatcgtcagagcgttaattcgtttcatgcctgcacctcctgcgtcaattgccagagcgcatcaaggaaatgtggaacaaaactgcctggcccctcgcttctggcgactgcgcgctctccggcttgtttcatccagtgacaggcagatgcgacattttccagcgtatcgcctggtaacgcacagcaggcagcgacaaccgccgataatgcacagccagttcctaccactttggtcattaacggatcgccaccgtgaatgccaacggcgcgatggccatcggtaacataatccacctcgccagtgaccacgacgattgcgccagtttcccgtgccagtgtttgtgcagcgggtatcgcgttagctgcggcgtcagtggtatccactccccgtccaccattagcaatgccagctaatgccatgatttccgaagcattaccacgtatcgctgccggtttaaaagataaaagttcatgacaaaaatggcggcgataatcgagcgcaccaaccgctactggatcaagcgtccagggtgtttgagagctttttgcttgctcaacggcagcacgcatcgcctgagcgcgtggctgcgtcagtgtgccaacgttaatcaacaaggcactggcgatagccgcaaactgactggcctcttcggtttcgataaccatcgctggcgatgcaccgagcgccagcaaggtattggcagtaaaggtttgcaccacatcgttggtcatgcagtgcacaagaggggaatgttggtgaaaaaggtgtaacgcgtgcgcagattgcgctgaactcagcaggtcgacttgcatagtttgctcctgccataacgtgaagaagcaatgacctggtggtccgtgacttccctacgctggcattatccagatcaggtgatacgggtatttctcagccttcacgcagaagggcaccccgagtcgtttggttgcgatgataaatcgcagaggaggatggtaatgtccagcgcacgcgttgtaaacgaggaaaaacggcagttttacaatcgcgttaataaattatttgatatatgaatccagcaccttcagaacgacatccagatcttcttcacgttttagctcatccccctggtgaacgatgtgttccgtcagatgacctttaatcacttcccgcatcagaccgtttaccgcgccacggatagcagcaatctgttgtaaaactgcagcgcattcgtgcggctcgtcgagcattttcttgagcgccacgacctggccctgaatcttactggcacgcgctttcagtttctgtttatcacggattgtatgagacatggcaacacctggttaacaagaatatgaaaaatcatagcactattaatctactggggggtagtatcaggtactgggggggagtagaatcagattgccgaattaatactaagaattattatcatgaccgaatttacaactcttcttcagcaaggaaacgcctggttcttcatccccagcgccatcttacttggtgcgcttcatggcctggaaccagggcactcaaaaacgatgatggcggcgtttatcatcgccatcaaaggcaccattaaacaggcggtgatgctcggactggcagcaactatttcgcataccgcagtggtctggttaattgcctttggcgggatggtgatcagcaagcgctttactgctcaatcagcagaaccgtggctccagttgatttccgcagtgatcattattggcaccgcgttctggatgttctggcgtacctggcgcggcgaacgcaactggctggagaatatgcacgagcatgatcatgcgcatcatcaccacgatcacgaagatcaccacgaccatggacatcatcaccatcacgaacatggcgagtatcaggatgcccatgcacgagcccatgccaatgacattaaacgacgctttgatggtagagaggtcaccaactggcaaattttgctatttggcttaaccggtggccttatcccctgcccggcagcaattaccgtgctgttgatttgcattcagttgaaagccctgacactgggcgcaacactggtcgtcagtttcagcattggcctggcgttaacgctggtcaccgtaggcgttggcgcagcaatcagcgttcagcaggtcgcaaaacgctggagcggatttaacactctcgctaaacgcgccccctatttttccagtctgttgattggcttagttggtgtgtatatgggcgtacatggcttcatgggcataatgcgataactcaatcctttaggcttgcatgttatcttcagcccaggatgattcttaaatcagctatttccgctgactctctgctcgctaaggatgcttttagggcatcctttcatttacactttttacgaaatcatgggatcactaacaaaatatcgcttgtcagttatattgtatggcaggaaagatatgcgactgatattacagatccccaaagtggagagtttatgaccattaaaaataagatgttgctgggtgcgcttttgctggttaccagtgccgcctgggccgcaccagccaccgcgggttcgaccaatacctcgggaatttctaagtatgagttaagcagtttcattgctgactttaagcatttcaaaccaggcgataccgtcccagagatgtaccgcaccgatgagtacaacattaagcagtggcagttacgtaacctgcccgcgcctgatgccgggacgcactggacctatatgggtggcgcgtacgtgttgatcagcgacaccgacggtaaaatcattaaagcctacgacggtgagattttttatcatcgctaaaaaaagccccctcatcatgagggggaaatgcagacaccttgttattttttattattagccacttgctcgtcttgcttgttattagtcgtatttcacgttgattaatgcggttgcctccagtgcgccagatttaattttatttgtatcgtagacgtagtaactggcagttatcggaattgaaaccgttgtatctgtaagttttgacttcgccgcaacttcctttaaatttgtatatcctttactgctgttagtgatatttaaaagtgtgactggcgaaccattactttcaagaataaatcctacgccattatcttccgcacctttcagtattgtgttgctgttggttaacaagtcagaacttgataaatacacctgcattttccgtgatgtttgattttgttgacctaataaatttttacaacgcagaataatatccccttgtttactatttattgttgctttgttacctgtggctggtaattgtgaaacgggaatactgtctaaagtaattaataaatcgtccggtttgcaggttgtggttatcgggttgtatgacaatgtcagattaaaggaatagacacctgcattttgtgccaatgcatttctgtagctatttacacatgcatcccatgacttgccacctaataaacacagtagaaattgtactgcggcactcccgcgtgtcgatgatgaagcactggataatgtcgcaacaccattaatcatcactgaaccgccgccccccgcagaaacattcacttttgcattactggccgcaggtgtcaccgtaactgaataaccactggtgaaactggtctgattatttgacaacgtgatgttgtttttattggtccattcaaaatgtaaatttaattttatggtatcgttataaagtccaacaataatatccgacgggctcataggggtgatagtatttgtacttacgcatgacgaatcattaaaattatgctcatatgtcgccatttgtgtttgagtaagtgcaaaatccccctgaacaaccaagttgtgctgaacagataactcactataacatgccgcatagctcacaggcataaccatcatcattaatataaatagcattatgcgaatttccatagaaccacctgactattactggcaaatataatttctactttcatcaatctctttaccgaaggtgattgtgcatgaaagtccttgttgcttatcaattgccacattaaccgatggcggtacttcattggtgcgaataaataactggcttccctggccgacaacgccaatattatgaccatggatatcattgacttcataaccaaacattaatggttgaccatccgctcttaactctttaataaaccagggcttgcgctgatcggtatcaaaattaaccagtacaaccgcgccgcgataaggggcggcaattttccggttgccacgtaattctgcttcgctatcgctttgcgacacatccagcatcaggtgattttcccgataaggtgtcattccgtcgtataccaccactccattacggtttgttgtgcgatatttttgcccattgacataagcatctttaattcctggcgcattcatcacagcaaacgtttcggaaagacggttcgccagattaacgccccccgaccaggcgacaatgccccctgaaacactggctccagcctgtcgataagtactcgactgactataactgccattcactgtcgcaaccggcgcgttccaggtcaaattcgccccagctgtcgtttcatttccctgattctgataactcaggttgaccccatagttaaactgatcccggcttccaacggttcctgataatcccgtattatttgaggcaaacccctgatcatcaaacgtcgttgagttagacatatatatttgccgacgaggcgtcgtaacgtcatcaccccaatcaaagggaatcgatataaaaatattaaaacgtttctcttcatgatgattctcgtcatacgcctggcttgccgcgaggatatagcttatccgccgccagttattggaataactcaactgataatccttactgctgccgctacgcccccagtaatctcgccataacgtacttaaggacacagacccccagccttctggcaatgactggctcatattggcagagaagctatttttacggccaaaatcgttctggtaataatcggcaatgtcatagacatcgttttcatcacggcgataattatctttattgtttgcccaaacgtgatcattaaatgtccggtaatcacgcgatgaataacgccaggccgccagaccaaaacgcgtcgacgtttggctcacaaatttgttgtaggcaatttgataactttgcccgtcaaacacatcgccgttgtcttgtttactatgcgacttcgtggcatcgacggaaatggcaccaatgcgtgtattccagccagtccccaaagtaaacgcgtaataattattcgcgaccatcgagccaccatacagcgtcaataaattattaaaaccatactgataacccgcctggacaaaatcactttgtttgctcgccccttcaatatggctacgacccgccgcaaaatcatatttcgatacgccgggttgcagcatatttggcactgctgcataaggcaccagataggtggttaccgagccgtccgcctctttcacgctgacatcaagatctgctccaccaccggccaactgcaaatctgtaatcgcgaacgggccaggaggaacctctttctgataaaccacaaaaccgttctgctcaatagttaccagcgcattactctgagcaatcccctgcacccgtggcgtaaaattttgtttcgagttaggcaacatctgcatatcacgaaacaaccgcacaccgctgaagcgaacagaatcaaaaatatcgcttgatgtgtacatatcacccacgcgaagcgtgccgagaagttgggcaaatccacgttccagatacagggtattgcttttccacacccctggattgttatttgttttactgaaactggcatcagaatgcagttgccaccccagtaaatttaacccgctgttaaaacgtacatatgtactcttactattacccgacgctttatagtcactgtaatactgactcacataataagaggtataaaacgcattaataccccgctcccagttttccggtggaacatagccactttccagttcttccacccaggcctgcgggacactgaaatcgagacgaaaaaccccgatatcccaggtatagctcccaccctgaacaagttgctcaaatgttaaacattgcttaccgctggcgaagttatcgctattaatgcctaaccgcttgataacttctattgataaacatgtttcttgcgggttgtctttaacaataatctcatatttcccgcgccattgcttattgacataaatatcgatgtcatactgccccggtaagggttgattatcatcaagacgaatatttgcaacctgctggtctttcattccacctatcataaaatgggtatcaaaggtttcttcagctgcataagcttcaatgccgagcaataacgctacgattgctgatgcaagtggggtcattctcaacataggcagctcctgcaattaaattttgtcactaatatagttgccgtggtcatcgataatggtcagataccagttatttgcattattacttttgacattaacactctgactttctaagggggcaatcattatagtttcataattgactttgacattattagctttgacatccgaaatcgtcacccaattagctgagtcattttttatcaccaatccattgccactgcgacttaccagtaactttttaaaggtcgctttatttaccggagcaatacccgccgggcggtaaaacaatttgattctgttttgcatcgcaaacttcagtgcattcttaccttcttgttctggactatttggtggaatatccagaacattcagataaaaaatgctttctttattagtgggcagtttattcggcataattttgatttttacttgctgcccggaatttgcccctatttttgccactggtggcgttaacatgaaaggaacctgaattttttctggtggtaacgacgtatcgccatcatcaatccacgcctgcagcagcgaagaacggtttccctggttcatcaactgcaccataacttctttattttctgccgggtaaataatgcgcgtcccgtagataacaattccggcatgtgcaggaaggaccatagaaaaaatgagtaaagataataatcctttcatcttaatgcctcttaaattaaaaagccgccatggggatagcggccatgtttattacctggagaaacttgcaattttatttattaatcctgcgccacacgcataaccagagaagataacacatcacctgattgcactgagttatctgtcagtttcaggtattttgctttaaacggaatagcatattgaccttccgctgttttataactctcaatgttaaaaggtgcagaaacatccaggacatcgctgttatcacctaaatagagatagtaacccacggtatcgttgctactggctatcgccttatcgttaccggttattttatcgttggtaatcaacgagagttttacaccagcaacttctttcgggcagctaatttttaacatgctgctggttacaccgactgcatcatcataggtagaatatttagctttaccttcaaagacagtggttggtacagtcggcatattaatacttactgaatcaccacccgcttcgaatttacacggagattctgcaatattccccttaatagttaatgttccggtatcaacgtctgcagcaaatactccagcgctcataaaaaaagaagaaaagacagcggcagcaataattgaacgtttcataatatgttccttaataaaatttatttttggttgttaagagtctgtatctcttggaaacaaatttctcacatcaaaaaagttgccgcaatgtaaacacattgttttattgatttaaaacaaattaaccattgcaatataaatacaacaaatatttaagagtattaactatttatcgcatctatcaattaatgtagatttatgtaaatggtattgttgatatcaataaaaaagccgaaatcatttatataaatgatttcggctttctaaatgcaattaaaatcaggttgccaaattaatcgtagcgatttaacacgattcgacgattgctatcgctacctgcaacaaccacttctgtcgttacacctttgacgggcgaagaaaacagatgacgggtgtcaacattatacgttaactgaccacaatgctgttgtggttgactattaaccatagccatactgcatgttgggggactgatcctgccattaatcgttaatgtggcagtctctgaagagaatgcgggagaagccaatccataggcaagaaaaataattcctgacagccaatacttattcattgaacgttatccctgtagtaaaggttatgcctggatagaatgagtgcataacaaactatagctgtacatccactacacagccacgaaggatgataatgaagcattgcctgtatgatcaatcgactttgtagagtttcggacgaaggtccgcagaatattcgcagtattaaataagtgttcattaatgcggcaaaaactaatacaccgcatcaatgtaacatctctgcggtgtatgaagaataaccagaatggttaataggcgttagaccgcgcggaaggaaatctcgcctggaatgacttcaccctgccagtagagctgagctgcaacgcggtcagccagctggcggtagatagcggtaaattcgctctccggacggctgataaccgttggcgtgcctttatcgagatcctcacgtaaggaaatgtgtaacggcatctgccccagcagctgtgtgtggtatttttcagccagtttctctgcaccaccggtaccgaaaatcggttcatggtgaccacagttactgcaaatatgcacactcatgttctcgacaataccaagcaccggaacctcgactttctcgaacatcacaatgccttttttcgcatcgatcaacgcgatgtcctgcggggtggtgaccacgactgcaccagttactggaatgttttgcgccagcgtcaattgaatgtcaccggtgcctggcggcatatcaagcaccagatagtcgagatccggccacaaggtttcctgcaacatctgcattaacgccttgctcgccatcggtccacgccacaccatcgcattgtcgtcagtgaccagataaccaattgaattggttgccaggccatgagacataatcggtgccatatgggtaccgtccggcgaagttggacgctgattttctgcgcccagcatggtgggaattgatgggccgtagatatcggcgtccagaatgccgactttcgccccttccgccgccagtgccagcgccaggtttaccgccgtggaggatttacccacgccgcctttaccggaactgaccgcaatgatgttcttcacaccattaatacccggctgattcttcacgcgttttaaggtggcgatattgtgcgacagtttccagtcgatagctttcgccccggtgatacgcagcagttcggcgctacattgctcttttaactcttcaaacgcgctatgccagacgaatggcataaccagttccacatgcaacgtgtcgtccatccaggcgacatggtgcaacgctttcagcgtggtgaggttatgcttcagggttgggtgctgaaaattggccagtgtcccggcgaccattgcgcgcaaggcttctggtgatttggcctgggattgttcgttcatcccgactccttttttgtatagataaaccatcagctgatagtttacctgaagaatatagagaagtacttacttaacattttcccatttggtactatctaaccccttttcactattaagaagtaatgcctactatgactcaagtcgcgaagaaaattctggtgacgtgcgcactgccgtacgctaacggctcaatccacctcggccatatgctggagcacatccaggctgatgtctgggtccgttaccagcgaatgcgcggccacgaggtcaacttcatctgcgccgacgatgcccacggtacaccgatcatgctgaaagctcagcagcttggtatcaccccggagcagatgattggcgaaatgagtcaggagcatcagactgatttcgcaggctttaacatcagctatgacaactatcactcgacgcacagcgaagagaaccgccagttgtcagaacttatctactctcgcctgaaagagaacggttttattaaaaaccgcaccatctctcagctgtacgatccggaaaaaggcatgttcctgccggaccgttttgtgaaaggcacctgcccgaaatgtaaatccccggatcaatacggcgataactgcgaagtctgcggcgcgacctacagcccgactgaattgatcgagccgaaatcggtggtttctggcgctacgccggtaatgcgtgattctgaacacttcttctttgatctgccctctttcagcgaaatgttgcaggcatggacccgcagcggtgcgttgcaggagcaggtggcaaataaaatgcaggagtggtttgaatccggcctgcaacagtgggatatctcccgcgacgcgccatactttggttttgaaattccgaacgcgccgggcaaatatttctacgtctggctggacgcaccgattggctacatgggttctttcaagaatctgtgcgacaagcgcggcgacagcgtaagcttcgatgaatactggaagaaagactccaccgccgagctgtaccacttcatcggtaaagatattgtttacttccacagcctgttctggcctgccatgctggaaggcagcaacttccgcaagccgaccaacctgtttgttcatggctatgtgacggtgaacggcgcaaagatgtccaagtctcgcggcacctttattaaagccagcacctggctgaatcattttgacgctgacagcctgcgttactactacactgcgaaactctcttcgcgcattgatgatatcgatctcaacctggaggatttcgttcagcgtgtgaatgccgatatcgtgaacaaagtggttaacctggcctctcgtaatgcgggctttatcaacaagcgttttgacggcgtgctggcaagcgaattggctgacccgcagttgtacaaaaccttcactgatgccgctgaagtgattggtgaagcgtgggaaagccgcgaatttggtaaagcagtgcgcgaaatcatggcgctggctgatctggctaaccgctatgtcgacgagcaggctccgtgggtggtggcaaaacaggaaggccgcgatgccgacctgcaggcaatttgctcaatgggcataaacctgttccgcgtgctgatgacttacctgaagccggtactgccgaaactgaccgagcgcgcagaagcattcctcaatacagaactgacctgggatggtatccagcaaccgctgctgggccacaaagtgaatccgttcaaagcgctgtataaccgcatcgatatgaagcaggttgaagcactggtggaagcgtctaaagaagaagtgaaagcagctgccgcgccagttactggcccactggcagatgatccgattcaggaaaccatcacctttgacgacttcgcaaaagttgacctgcgcgtggcgctgatcgaaaacgcagagtttgttgaaggttctgacaaactgctgcgcctgacactggatctcggcggtgaaaaacgcaatgtcttctccggtattcgttctgcctacccggatccgcaggcactgatcgggcgtcacaccattatggtggccaacctggcaccgcgtaaaatgcgctttggtatctccgaaggcatggtaatggctgctggtcctggcgggaaagatatcttcctgttaagcccggatgctggtgctaaaccaggccatcaggtgaaataatccccctttaaggcgctgcatcgacagcgccttttctttataaattcctaaagttgttttcttgcgattttgtctctctctaacccgcataaatactggtagcatctgcattcaactggataaaattacagggatgcagaatgagacactttatctatcaggacgaaaatcacataaattctgggcagttgagcaacagggaaacgagttgcatatcagttggggaaaagttggcaccaaagggcaaagccagataaaaagtttttcagatgctgcggcagcggcaaaagcggagcttaagctgattgcggagaaggtgaagaaggggtatgtggagcaagcgaaggataattctttgcaaccttcccaaacggtaacgggctctctcaaggtagcggacttatccaccattattcaggaacaaccctctttcgtagcagaaacccgtgcgcctgacaaaaatacagatgctgttttaccgtggctggcgaaagatattgctgtcgtttttccgcccgaagttgtacacaccacgttaagtcatcgccgctttcccggagttcctgttcagcaagcagacaaattgacccaattacgtcgcttagcctgtagtgtgtcgcaacgggataataaaacagccacatttgacttcagcgcctgttctttagaatggcaaaacaccgtcgcccaggcgatcagtcagatcgacggcctgaaaacaacacagctaccatcaccagtaatggctgtactcacggcacttgaaatgaaatgcacaagatataaagtgcgtgaggatgttatggatcagatcgtccaggaaggcggtctggaatatgctactgatgtaataatacaccttcaacagattgatattaaatgggattatgcgaataatgtcattattattctgccgtctggcattgcacctgactacttggagcaatattccagatttgaattacgcctacgtaaacatttatcactggcggaagagtctctctggcaaaaatgtgcacaaaaacttattgccgcaattccacatattccagaatggcggcaaccattaattgctttgttattacccgaaaaaccagaaattgcacatgaaattgcccagtgtatgctgccaacttactgatttagtgtatgatggtgtttttgaggtgctccagtggcttctgtttctatcagctgtccctcctgttcagctactgacggggtggtgcgtaacggcaaaagcaccgccggacatcagcgctatctctgctctcactgccgtaaaacatggcaactgcagttcacttacaccgcttctcaacccggtacgcaccagaaaatcattgatatggccatgaatggcgttggatgccgggcaacygcccgcattatgggcgttggcctcaacacgattttmcgycayttaaaaaactcaggccgcagtcggtaacctcgcgcatacagccgggcagtgacgtcatcgtctgcgcggaaatggacgaacagtggggctatgtcggggctaaatcgcgccagcgctggctgttttacgcgtatgacaggctccggaagacggttgttgcgcacgtattcggtgaacgcacgatggcgacgctggggcgtcttatgagcctgctgtcaccctttgacgtggtgatatggatgacggatggctggccgctgtatgaatcccgcctgaagggaaagctgcacgtaatcagcaagcgatatacgcagcgaattgagcggcataacctgaatctgaggcagcacctggcacggctgggacggaagtcgctgtcgttctcaaaatcggtggagctgcatgacaaagtcatcgggcattatctgaacataaaacactatcaataagttggagtcattammggtatcactatggcgcaaatggaactggtgatgaaagccgctggttttaaagaagtgaaataatctgtcggcggccatgtttcgcatggccgccatacccgtcttagcttttcttcacatgctggcgcgctgccagtccacgcagaaaataacgtaaaaattgatcgccgcattcgcggaagtttttatgatccggtgcgcgcatcatcgctgtaatttccggcatcgaaacgcggaactgctgttcggtgaggatagccagaatgtcatcggttttcagcgaaaacgcgatgcgtaattttttcagcacgatgttgttattaatgcgacgttccggctccagtgccggagcagactcatccttgccgcgtttttcataaatcaggccgttgaggaatgacgacaaaacaatgtccggacaacgctgaaaaccctcttcgtcttctttacgtagccagacggcgatctgttccgcggtggcttcgacattacccagcgccagaatacgcaccaggtcattattattggctttcaaaatgtagcgcacgctgcgcagaatatcgttacttagcatgaggccttcaggtgttgatgaggcaaaaagccattttagcagtcttttacaggccaatcgcctcttttaagcttttcagataacggcggctgaccggcacggttaagccattacgcaaaatcaactcggcctggccgttatcttccagacgaatctcctgtaaatgcgcgagattaaccagatactgacgatggcagcgcagtagtggtgtacgactttccagggtacgtaatgtcaattcggtaaagccctctttcccttcgtggctggtaacgtagacaccgctcatccgactgctgacaaatgccacatctttcatttgcagcaaataaatccgactatgccccgtacaagggataaatttcagcgcctgttgattttccggtaacagcgaaacatcctgcttgctgcgctcctgacgcaatcgcgccagcgttttctccagtcgcgcttcatcaattggcttcagcagataatcaaaagcatgttcttcaaaggctttaatagcgtattcgtcaaacgcggtgagaaaaacaatatacggacgatgttccggatcgagcatccccaccatttccagaccactgatgcgcggcatctggatatcgagaaacagcacatccgggcgcagtttatgcaccgcgccgatcccttccacggcgtttgaacactctccaacgatttcaatatcgctctgctcctgcaaaaatacgcgcaggttctcccgtgctaacggttcatcatcgacaattaagactttaatcatgcctcgtccctccatggtagtcgtaacgttattcgggtgtaactatcaggctcacaggcgacgcttatcccatagtcatcgccaaaccgttcacgtaaacgcttatccaccagattcatccccagcccactggcattggttaccggttgatacaaaccggcattgtcttcgatctccagcatcaaatgttgcccctcacgtcgggcgctgattgccactcgccctgtatccagcagttgtgatgtcccatgtttaatggcgttttccactatcggttgcagggtaaacgcgggcaattgctgctgggataattcttgcggaatagcaatgttgacctgcaaccgcgactggaagcgcgccttttcaatttgcagataagcgttcacatgttcaatttcgtcggcgagagtaacaaactccgaaggccgctttaagtttttgcggaaaaaagtggaaagatactgcaccagctggctggcctgttcgctgtcgcggcggatcaccgctttaatggtgttaagcgcattaaacaaaaaatgaggattcacctgggcgtgaagcagtttgatttctgactgggtgagcatcgctttttgccgctcatattgcccggcaagaatctgcgccgaaagcagttgcgcaatcccctcgcccagcgtgcggtttattgaactgaataaacggtttttggcttcatacaatttgatggtgcccatcacgcgctgattttcgccacgcaacggaattaccagcgtcgaccccagtttgcattgcggatgcaaagagcaacgataaggtacttcgttgccatcagcgtagaccacttcaccggtttcaatcgcttttaaggtgtaagtcgaagaaatcggtttgccgggtaaatggtggtcgtcaccaattccggtaaaggccagcaatttctctcgatcggtaatcgcgactgcaccaatatccagctcctgatacagcacctgagccactttcatgctgttcacttcgttaaacccctgtcgcaaaatgccttccgtcgaggctgccactttcagcgcagtggcagaaaaagcagaagtgtatttttcaaacatcgcgcgtttatcgagcaatatacgcataaacagcgccgcgccgacggtattggtgaccatcattggtgcagcaatattactcaccagacgcaccgcatcttcataaggtcgggcgatcgcaaggatgatcagcatttgcaccatttcagcgacgaacgtgacggcaccggcggtaatggggttaaagactttatcagtgcgcccgcgacggatcaggatgctgtgtaccaggccgccgagcaatccttcaacgatggttgagatcatgcaacttagcgcggtcatgccccccatcgaatatcgatgtaagccgccggtcagaccaaccagcccaccgacgaccggaccgccgagtaagccgcccattaccgcgcctatcgcacgggtattggcaatagaatcgtcaatgtgcaacccaaaccaggtgcccatgatgcagaaaatggaaaagacgatgtagcagagaaatttatgcggcagacgaaccgtgacctgcattaacggtatgaataatggcgttttactcattaaccacgcaatgactaaaaaaacgcacatctgctgaagcagcagcaacaccagattaaaatcgtacatacccgcaaaccacacttccctttaaaacgcgtaacatacattgcctgcgtttaactttctttgaactcttgcagaaaaatgagaattcgtgagtacgatcactcaaaatcgcctggcaaaaataaaatcaccctatagatgcacaaaaaacgggcaaaactacctggttcgcaaaactgcgtctaaagttaaaccgggacctcgcgagcaagggtgagacgatggcgctttacacaattggtgaagtggcgttgctttgtgatattaaccctgtcacgttacgcgcgtggcagaggcgttacgggttgctgaaaccgcaacggacagacggcggtcatcgactgttcaacgatgccgatattgaccgtatccgcgagatcaaacgctggatcgacaacggcgtgcaggtcagcaaagttaaaatgctgctcagtaatgaaaatgttgatgtgcagaacggctggcgcgatcagcaagaaacattactgacctacctgcaaagcggcaatctgcatagcctgcgaacgtggatcaaagagcgcggtcaggattaccccgcccagacactcaccacacatctgtttattcctctgcgccgacggcttcagtgccaacaaccgactctccaggcgctgctggcgatcctcgacggcgtactgatcaactacatcgccatttgtctggcttcggcacgtaaaaaacagggtaaagatgcgctggtggttggctggaatattcaggataccacccgtctgtggctggagggctggattgccagtcaacaaggatggcgcattgatgtcctcgcccactcgctcaatcaactacgccctgaactattcgaaggccgtacattgctggtgtggtgcggtgaaaatcgaacctccgcccaacagcagcaactcaccagttggcaagaacaaggccatgatattttcccactcggcatttaatgattcgttaacaaatgcgctttactgtacaatcctttcgttaacataaggagtgcaatatgcgcatagctaaaattggggtcatcgccctgttcctgtttatggcgttaggcggaattggtggcgtcatgctcgcaggttatacctttattttgcgtgctggctaagcgcctgcaccagcctttcaaacaggcggtctgcgatgatcgccgccagtgccaccagtaacgccccctggatcacatacgcggtattaaatccgctaagcccgatgatgatgggcgtacccagcgtgctggcccctaccgttgaggcgatcgtcgccgtaccaatgttgataatcaccgaagttcgcacgcccgccagaatcaccggagccgccagcggtagctcgaccttacgcagtcgctgaccacgactcattcccatacctttcgcaacttctgtcacgctggcatcaatcgctcccagcccggcaagtgtcgcctgcaggacgggcagcacaccgtaaaggatcaaggcgataatcgctggttgcagaccaaagccgatcaccggaacggcaatcgccagcactgcgacaggcggaaaagtctgtccaacggcggcaatagtttccaccagtgggcgaaattccgcgccccacgggcgagtgacagcaattccggcaccagtgccaatgatcaccgcaaacaaactcgaaattcccaccagccagaaatgagccagtgccagagctgcaaaactttcttgctgataaacgggtcgtggcagttgtgggaacaaggcagcaaacagcggctggctgtaaggcagccagaaaatcagtgccacaaacaaagcaatgagccagaacagcggatcgcgcaacatcttcatacgcttacgcctccaccagcagatcctgaaaatgcagcgtaccgcaaggctggccctgcgtgttcatcaccggcagcacctcgcatccccgcgcgacaaacagggagagcgcatcgcgtagcgtcatctcttctgccagtgcctcaccttctgcccgttcttcgcgacgcacgtaatccgccacactacgtaacgaaagcaggcgcacccccagttcactacgtccaaaaaactggcggacaaaatcattcgccggacgagtcagcatcgtcagcggattcccctgctgcaccacttcaccgtgatccatcaataccagatgttctgccagccttagcgcctcatcaatatcatgagtgaccagcacaatagtgcgccccagcaaacggtgaatgcgcgtcatctcttgttgcaacgcgccgcgcgttaccgggtccagtgcgccaaaaggttcatccatcagtaagacttgcggatcggcagccagtgcgcgcgccactcccacacgttgctgctgaccaccggaaagctgatgcggataacgctcacgcaaatttgactccagccccagtagcgtcattaattcgtcgatacgatcgtcaatccgtgcccgcgaccatttttgtaattgcggcacggtagcgatgttttgcgccacgctccagtgggggaacaggccaatagattgaatggcatagcccatccggcggcgcaactccagtactggcagcgagcgaatttcttctccggcaaagcggatctctccgctgtcatgttccaccaggcggttaatcattttcaaggtggtggatttgccggagccagatgtgccaatcagcaccgaaaaactcccttcctgaaaattgagattaagatcgttaacggctttttgtgcgccaaacagtttgctgacatggctaaattcaatcattacgtttcaccttcagcagtgcgataagcaaatcgaacagggcatcgatcagcaccgccagaacaattaccgggatcacccccagcaacactaaatcaatggcgctgcttagcagcccctggaaaaccagcgcaccaaaaccgcctgcgccgattaacgccgcaatcaccgccatacctacagtttgcaccatcaccacccgcaggctgcgcagaaataccggtaacgccagcggtaactgaacatgcaggaatcgctgcgccccgctcatccccatcgctctggcgctctccagcacatcgcgcgggatctggttcaagcctactaccacgccgcgcaccagcggcagcaaggcatagagcaccagcgcaatcagtgcgggtgtcattccggttcctgctatgccgagcttccccagccacggaaaggccgtaaccagcgcggcaagcggcgcaatcaacaggccaaagagcgccaccgaaggcacggtctgaatgacattgagcagagaaaaaattgccccctgccgcgcagtggaaaagtagcaccagatgcccaacggcacaccaatcactaacgcaggcagcaccgcaccaaacagcaacgtcagatgttgtgccagcgcgtcgtcaaacacatcctgacggttggcgtattctttcattagtgagagatcgttaagcgtgccggagtacagcaaccacagcggaataatggcaatctgcatatgcaacaaccagcgccacagcggatgcgtggagattcggcggatggcatcgctacaggccagcaatgccagcgccgcagccagccagaaaccactgccgaggctggtacgcgccagcgcactgccattttgcgccagttgggtcgccgcctttccagctccccacaccaacaatacgaagacgaattgcgccagaatgagtgcacaaatgctgccttttttagcggggacaaaacaggctgtcagccaggcgcaaccaacgcccaccagcatccagatcgtttgcggccacagttgccagagatgacgcccttcacccgagactaaacgattaggcgcgtagctgataaacggcagcgctgctgcgattgccgtcagcaacagcagcagcgccagaacaggattaatacgtagataagtcacgggaaattacttcgcccaccctttttgtttcaggtagtcggcagccacttttttggcatccagtccttccactgcaatgctggcattcagttgctgcaatgtttttgcatcgaggctggcgaagactggctgtagccactgtgccatttgcggatactccttcaacaccgattcacgcaccactggtgcaggcgcatagataggttgcacgccttgcggatcgcttaaggtttgcagccccagcgccgctaccgggccgtcagtgccgtaagccattgcagcattaacgccagaggtttgctgggcagcggctttgatcgtcaccgccgtgtcgccaccagccagtgacagcaactgatcctgaccgagcttaaagccataggctttttcaaacgcgggtaacgcatcggcgcgttcgataaactctgccgaggctgccagtttgaaggtgccgccctcttgcagataacgactcaggtcggcaagcgaagtgagtttatttttctctgccacatcctgacgcacggcgatagtccaggtgttatttgcaggcgcgggcgtcagccagattaacttgttgtgctccgaatcgagctttttgactttctcgtaaccttgctgcgcgtttttccacgctgcatcgttttcatctttaaagaagaaagcgccattgccggtatattccggatagatatccagttcaccggaagtaatcgccccgcgcaccacaggagtcgttccgagttgcactttattcaccgtcggtacgccgtggctttccagcacctgcaaaatgatattgccgagtagcgcaccttcggtatcgatttttgaaccgactttaacgggggaagccgcctgtagcggcaggctcacggctgccaacataaccagtgaacctgcccagagctttaagagtggcatgatgctttcctcattcttttactgttgttttcagcgaattaagagaaaagcatagttgataatggcggggttagcttgagcggaaggattcagttgcagaatcagataaatacttaagaggcatattcggtccggcgtttcctgccggatgcggcgcgagcgccttatccggcctacaaagggcgcaaacgtcgcgcccttactaaagcattacagcaactcaaactcgcctttcttaacgcgtgcggaatcagtgccgataaatacattgaacttgccaggctcggcgtcatatttcatctgttgattccagaacttcagcgcctcaatatcgatcgggaagctgacagtctgagtttcgcccggtttcagggtgattttctcaaagcctttcagctgtttcacagggcgactcatggaagccgtcacatcctgcaagtacatctgcactaccgtggccccctcgcgcttaccggtgttcgtcacctgcacgctggcagtcactttgccgtcacgcttcatggtcggcgcagaaagtttcacatcagagacggtgaaagtggtgtagctcagcccatagccgaacggatacaacgccccgttagcttcatcaaaataacgcgaagtgtatttgttcggcttgtcggcattatacgggcgaccggtattcagatggctgtagtacaccgggatctgcccgacagaacgcgggaaggacattggcagcttgccggacgggttgtaatcgccaaacaatacatcggcaattgcattaccgccttcagtccccgcaaaccaggtttccagaatcgcatcagcctgctgatcttctttcaccagcgccagcggacgcccgttcatcagcaccagcaccagcggtttaccggtggctttcagcgccgcaatcaagtcacgttggctttgcggaatagtgatatcggtccggctggaggcttcgtgcgccatcccctgtgcttcaccgactacagccaccaccacatcagattgtttcgccgtctgcaccgcttcatcaatcatctcttgcggcgaacgcggatcgactttgaccgcttcttcatactgattcaggaaatcgataatgcctttgtcactggtaacgttcgcccctttggcatacagcactttaccgttttcaccgacggaatttttaatcccagtcagtacggtcacggattgatcggcaacaccggctgcggaccagctgcccatcacgtcacgtttactgtccgccagtggcccaaccaccgcaatggtggccgattttttcagcggtaacgtttcgagacggtttttcagcaacaccaggctttcgcgcgccacttcacgcgcttctttacggtgcaggcggctttcggcattagtgtcaaccgggtcagactctttcggccccaaatggctgtatgggtcgttaaacaatcccatatcatatttaacgttcagtacatggcgggcagcatcgtccagctcttccatcgtcactttgccggatttgatcaacccaggcagatacttcgagtaatactcgtcgctcatactcatgttgattccggatttcagcgccacgcgcaccgcatcttccgggtctgccgccgtgccatgtttaatcagctctttgattgcaccgtgatcggaaacggtgatgcctttaaagccccactggtcgcgcagaacatctttcagcagccaggaatcggaggtggctggcgtgccgttcagcgagttcagcgccaccatcaccgcgccgctgcctgcgtccagccccgctttgtacggcggcatataatcattaaacaggcgctgcggactcatatcgacggtgttgtactctttaccgccttctaccgcgccgtatgcggcaaagtgtttgacgctggtcatcaccgagtagcgatctgccgggcttttaccctgcatcgcttccaccatggttttacccattgttgaggtgagatacgtatcttcgccaaaaccttcggaagcacgtccccagcgcggatcgcgcgagacatcgaccatcggtgcccaggtcatattcaggccatcatctgccgcttcataagcagagacacgtccgaccgttttcactgcatcgaggttaaaagacgaggccagaccgaggctaatcgggaacaccgtgcgctgaccgtgcagcacgtcgtaagcaaagaaaagaggaattttcaggcggcttaattccatcacctgatcctgcatggcgcggatatcctgacgggttacggtgttgaaaatcgccccaacctgaccgtctttgatcatctcgcggatcgcctctttcgggttatccgggccgacgctgattaagcgcagctgaccaattttctcatcaactgtcattttcttaagcagttcggtgacgaacgcatcccgcgcttcgggcgttaatggatggttgccgaataaatcatccgccagtgctggctgcagggccagactcaccgcgattcctactgaacatagccatttcatatggatttttcttcctctgttgcccgacgaggcagcgaaaatggtgcaaaaaccgtagtttgccataagcatgatggagagagaaaaagaatgctcagtttattgtctgaattttcaaaatattcactcgctgaattgtcatacaaggcgctattctagtttgtgatattttttcgccaccacaaggagtggaaaatgtcttccatgacaacaactgataataaagcctttttgaatgaacttgcccgtctggtcggtcattcacacctgctcaccgatcccgcaaaaacggcccgctatcgcaagggcttccgttctggtcagggcgacgcgctggctgtcgttttccctggctcactactggaattgtggcgggtgctgaaagcctgcgtcaccgccgacaaaattattctgatgcaggctgccaatacaggcctgaccgaaggatcgacgccaaacggtaacgactatgatcgagatgtcgttatcatcagcaccctgcgtctcgacaagctgcacgttcttggcaagggcgaacaggtgctagcctatccgggcaccacgctctattcgctggaaaaagccctcaaaccgctgggacgcgaaccgcactcggtgattggatcgtcgtgtataggcgcatcggttatcggcggtatttgtaacaactccggcggctcgctggtgcaacgtggcccggcgtataccgaaatgtcgttattcgcgcgtataaatgaagacggcaaactgacgctggtgaaccatctggggattgatctgggcgaaacgccggagcagatccttagcaagctggatgatgatcgcatcaaagatgacgatgtgcgtcacgatggtcgtcacgcccacgattatgactatgtccaccgcgttcgtgatattgaagccgacacgcccgcacgttataacgccgatccggatcggttatttgaatcttctggttgcgccgggaagctggccgtctttgcggtacgtctagataccttcgaagcggaaaaaaatcagcaggtgttttatatcggcaccaaccagccggaagtgctgaccgaaatccgccgtcatattctggctaacttcgaaaatctgccggttgccggggaatatatgcaccgggatatctacgatattgcggaaaaatacggcaaagacaccttcctgatgattgataagttaggcaccgacaagatgccgttcttctttaatctcaagggacgcaccgatgcgatgctggagaaagtgaaattcttccgtccgcattttactgaccgtgcgatgcaaaaattcggtcacctgttccccagccatttaccgccgcgcatgaaaaactggcgcgataaatacgagcatcatctgctgttaaaaatggcgggcgatggcgtgggcgaagccaaatcgtggttggtggattatttcaaacaggccgaaggcgatttctttgtctgtacgccggaggaaggcagcaaagcgtttttacaccgtttcgccgctgcgggcgcagcaattcgttatcaggcggtgcattccgatgaagtcgaagacattctggcgttggatatcgctctgcggcgtaacgacaccgagtggtatgagcatttaccgccggagatcgacagccagctggtgcacaagctctattacggccattttatgtgctatgtcttccatcaggattacatagtgaaaaaaggcgtggatgtgcatgcgttaaaagaacagatgctggaactgctacagcagcgcggcgcgcaataccctgccgagcataacgtcggtcatttgtataaagcaccggagacgttgcagaagttctatcgcgagaacgatccgaccaacagcatgaatccgggaatcggtaaaaccagtaaacggaaaaactggcaggaagtggagtaaaaattacggatggcagagtatcgccatccgaattcacttaatcgttctgtgccgtctgccccgccgccgccatttgggcggctttttgttttttatagctcaacgctgctgccggcacaggcatcactttaccggtttcaatccaggtacgcaggcggctggcatcggcaaaatgggtatatttgccaaacgcgtccatcactaccagcgccaccggtttattattgataaccgtacgcatcaccagacaatggcccgccgcattggtaaagccggttttggttaactgaatattccagttatcgcgatacaccagatgattagtattgcggaacggcagcgtatacgtcgggttagagaaggttgccatatcttcccgggtagtacttaactgcccgatcaacggatactgtttgctggcaatgagcagtttggttaagtcacgggcagttgaaacgttatgcaccgacaatccggtaggttcaacaaagcgcgtgttgttcattccgagcgatttcgctttcgcattcattgccttaataaaggctttgtaaccaccgggataatggtgcgcaaggcttgccgccgcgcggttttctgaagacatcagcgccagcaacagcatatctttacggctgatttcgctattcagtcgtacgcgcgaatagacccctttcatctccggcgtctggctgatatccacttttagttttcatccagcggcagtcgtgcatccagcacaaccatcgcggtcattaatttgctgatagacgcaatcggacgcaccagatccgggtggttcgaatagatcactttgttggtattcagatcaacaatcatcgcgctaccggaggcaatttccggttgtgaagcggtggtagcggctgccgttttcgcaacggcctgcggtgccaaaggcacagccagcatcagggccaggctaaataaagaaactcgaaatttcggcatgatgagcattcagatagtggttcacgcgcacgggttgcgcaccgccggagtaaggatttactgaggctagcgacgccatcataacgagcaaaaagtgcgatcgtcaaaggagaatcgtgaggaaatgctgcattgctgacatttacgccagcaatgcaatgtcaaagaactttctagaacaggcgatacccgtagccccatagtataacggttagggcgagcagcacttccagtaccagcacgccaatcgccagcgtcgaactggagaagctaaggccttcctctttgttgatattcaggaagctcggaataccaaggtaaagcaggtagccggtgtaaaacagcgccaccgtgccgaccagcgcacacaaccagaccagcggataaagcgccaccagaccgcttaaaaacagcggagttgcaacgtagcccgcgaagaccatgcagtgcgcaagtgacggacgctgcgggtaattgcgcgccatccaccagatgacccgccccatcaccgcgaccccagccagcataacgccgtaaaacaagacagccagcgccagtccggtaaaccaggataacttcaggatagtgccatcgccaaaattccagccaatctgtgtagtgccaatgaaggcgcaaatcaccggaatcgccgccatcagcaaaacgtggtgggtgtaatggtgagaaatcgtttcgttttcgcgattaatcacctgcatttcacgatcgggatgggaaaacagtccccagacatggctcataccgcccccttgttgtgagttcatgaacctgacagttcaagtataagtcagcttgtgattattttttgttcgcccatgtaattttcactgtctgatgaacgtccttttcagcgtgaatgattcacagggtgtatgcttactggcaaccaaagggagacagactggcctatggatctcaatacacttatctcacaatatggttatgccgcgctggtgatcggtagcctggcggaaggtgaaaccgtgactttgctgggaggcgttgcggcgcatcaggggctattaaagttcccgctggtggtactttctgtggcgcttggcggcatgattggcgaccaggtgctctatctgtgcgggcggcggtttggcggcaagctgttacgccgtttctcgaaacatcaggataaaattgagcgggcgcagaaacttatccaacgccatccgtatctgtttgtcattggtacgcgctttatgtatggctttcgggtgattggcccgacgctgattggtgccagccagctgccgccgaaaatctttctgccgctgaatattctcggcgcatttgcctgggcgttgatttttaccactattggttacgctggtggtcaggtgattgcgccgtggttgcacaatctcgaccagcatttgaagcactgggtctggttgattctggtcgtggttctggtggtgggcgtgcgctggtggctgaaacggcgcgggaagaaaaagccggatcatcaggcgtaaaaccattgccctgggtaaggcgttcgcgccgcatccgacatccggtgcaccatgcctgatgcgacgcttgtgcgtcttatcatgcctaccaaaattttacccattgaaataaccacgcacctcactgcgctattctgggttgaactgcggattcgccaacataaagccgccatccactatcaacgactgcccggtggtgtaatttgcgccctctgagcacagccacgctaccaggctggcaatctcatgcgttgcgccaaaacgccgcagaggaatcgaaggctccgcgtcgggcttcacgtcgctgtcatccatgccattcattggcgtggcgatcgccccaggcgcgactgcgttcaccaaaatcttatgcctgaccagctccagcgccatcgttttggttaacccgccgagcgcatgtttagcggctgtgtaagcgctggcatccggcagcggcgtatgttcatgtaccgacgtaatgttgatgatgtgaccgccctgcccttgtttcaccatctggcgggccgcaatttgtgagcataaaaatgcaccatcgacatcaacggtaaaaatcttgcgccactcatcgaaagccatatcaagaaacggcgctttggtcattgcgcccgcattattcaccagcacatcaatacgccccagccgttgaatgagtttctccagcgcctgcgcaccttctggcagtttaccgagatccagctgcacgatctccgcacgtacgccgtggctaactacctcacgcgcggtatcttttgccccttcttcatctgagtgccaggtaatgccaatatcaaacccctgctgcgccagtaataacgcgcactctttgccgatccccgaatcggaggcggtaataatcgcaacctgtgccatcgagttctccacttaacgctgaataaacgttaagtatagaaggcgcatatcatcagcgtttgtaacccccgcccaacgcaccagtgagttgaatggaagcatccagccactgcccttgcaataacaggccattggcccgctcacgcagcgcggggattctggcttcgctgacgcgggaaccagcaatgatgcccgcgttaaagcgcgcctgcgcaagacctaccacacgcaaggcatcgcgctcaatttgcgcctgatgctggtttttctccgcaagtgtctgaacctgactggctgcccgcgccacgtcattcaccgcttcaaccaccgctttgttgtagctggcgatagacaagttgctttcggcttttgcgatatcgagattggcgttaagacgaccactatcgaaaatgggtagcgtcaggcctgccgtaacgcccatttgctgcgcggaatgacggaacagatcgcttaagtgcaacgcatcctgttgcaggaaggccatcaggttgatgtcaggataaaatgccgcttttgccgcatcaatggtgcttagcgatgactcaacgtaccagtgcgccgcctgcaaatctgcccgccgggccagtaaggagtaccccagttcatcaggaagctggcttgccactttcggcaacgcgaccggtttaagcttcaatgactttgtctggttatttgtaagtgcacttaaccgtgcctcaataattttcattttccccgcgacatcgttgagctgctgccgggttttgctggcattaatatcggtttccacaccttcaactgaagaagtaatcccgttctgatatagctggcgatcggtcgcgataatggtgttctgctctttttctatttgctgcaagaccgtgtttaacgccgcctgggtttgccactcccagtacaggcgggctacgctgccagccagcaattggcgggtttgctcgcgttccgccgcccgtgctttaaccgtacccaggcgggcagtaacctccgcccgattctttccccagatatcgagatgccagcccgccgttaagccaaaagttccgttggtgtaccacggaccggtcgtacctgcggccggatcgttcagagcaaacggccccattaagccttctgccgacattttttgccgctccatatccgcagaaaagtcgatctgcggaccatcctgagtagcaattgccttcgcctgggcttcagctagctgaatgcgctgttcagccacctgcatatccggtgcgttctgtagtgcattgttaattaaggaagtgagttgattatcgtgatactccagccaccattggctgtctggccaaccatttttcagcgccgtgggtaatgcggtgtcaacttgtgcagcgggcgtttgctggcttaatgcctggcgggtttcatgcataggcgcacacccggccagcatcagtaacagcggaaaacaggcgatggcgggataaaaggaatcacgattcatgggggaataatcaggtaagaaaaggtgcgcggagattaccgtgtgttgcgatatattttttagtttcgcgtggcaatacatcagtagcaataaaacgacatatccagaaaaatatagactaagtaaatgatatcttccgatttatcttaatcgtttatggataacggcaaagggcttcgttttttcctatacttattcagcactcacaaataaaggaacgccaatgaaaattatactctgggctgtattgattattttcctgattgggctactggtggtgactggcgtatttaagatgatattttaaaattaattaatgtcatcaggtccgaaaataacgagaatatttcagtctctcatcctgttgcgctcctgtcatgtgcattgcttcatataatcactggcgcaaggagcgcgcagggnncggccaannnccgnngccccctgcacccccgggctctggcgaacaaaatcgccgctgcgcggtgccctcggcttatcccttacggctaccgggtcgggcgcgaggtaacatccctgtaaaacgcgccctcagcccacatccatgtgggctgccccggccttcagggaacgcctcggcaattttgacgccaccaaacaaccgtgcggcctattgataaagagctaacacattgtcaaaaaacatcactatggttttttagagtttctcgatatcaattgcctgaatagcccttgcaatatcaggggaattattcaacacccgaacatgctgaaataatcccgttgcttcatcgtattctttacgcaaataactcaaccactgtttaatccgcgcaacgtgatataacccggtatcgccctgcttttccagacgggtatatttttgcagcaaagcaaccacctccggccacggcattcgcggttcgttatattttactacccggctcaggttgggaatattgagcgccccgcgaccaatcatcactgcgtcgcagccgctgatcgcaatgcattgttgcgcgctctgccagtcccagatttcgccgttggcaatcaccggaatattcagccgctggcgaatctcgccaatcgcctgccagtcaatatgctccgcgcggtaaccctgctcttttgtccgtccatgcaccaccagctccgtagcaccagcctgttgaaccgcatcggcgatttcaaatttcttctcaccgctgtcccagcccagacgcactttcacgctgacgggcaaatgcgccggtacagcttcacgcatcgcttttgcaccctgatagatgagttcaggatctttgagtaacgtcgccccaccaccgctaccgttgaccgttttcgacgggcagccgcaattgagatccacgccccaggaacctaattccaccgcacgggcggcgttctctgccagccattgtgggaactgacccaacaactgcacgcgcaccagcgtaccggatggtgtccggctggcgttttgtagctcagggcaaatgcgatgaaaaacttttaccggcagcagttgatccaccacgcggacaaactcggtgatgcacagatcgtagtcgttaacttcggtcagcaattcacgcaccagagagtcaagcactccctccatcggtgccagtaacacacgcatatcatcacccgcaaaataatgaggcgctatgttagcgcctatggtcagcggattaaaggtctacaaagagggattgctgcaaactgcaatccctctctatgcttgatgtatgcctgagttcgttgcgcattgcgtaatgccggggagcgaaaaaataagcgctgatttcttaatgtgatcggtagcacgttttacgaattaattgtatgatgaatccatctcatctggggtgttgattatgagtaagacactgaacattatctggcaatatttacgcgctttcgtcctgatttatgcctgcctgtatgcaggcattttcattgcttccctgctaccggtaaccattccgggcagcatcatcgggatgctgatcctgtttgtcctgctggccttgcaaattcttccggcgaaatgggtcaatccggggtgctacgtactgattcgctatatggcgctattgtttgtgccgattggcgtaggcgtcatgcaatattttgatttgctccgcgcgcagtttggcccggtagtggtttcctgtgctgtcagtacgctggtggtttttctggtggtgagctggagttcacaactggtacacggtgaacgtaaagtcgtaggtcagaaaggatcagaagaatgatggcgaatatctggtggtcattaccgctgacgttgattgtcttttttgccgcccgcaaactggcggcacggtataagtttcccctgcttaacccgttgctggtagcaatggtggtgatcattccttttttaatgctgaccggcatctcttacgacagctactttaaaggtagcgaagtgctaaacgatctgctgcaaccggcggtcgtcgcgctggcctatcctttatatgagcagctacaccagatccgcgcgcgctggaaatcgatcatcaccatctgttttatcggcagcgtggttgcgatggtgacggggacttccgtggcattgttgatgggcgcttcaccggaaatcgccgcgtcaatcctgccgaaatcagtcaccacgcctattgcaatggcggttggcggcagtattggcggtattccggcaatcagcgcagtttgcgtgattttcgtcggcatcctcggcgcggtatttggccatacattgcttaatgcgatgcgtattcgtaccaaagctgcgcgcggtctggcaatggggactgcctcgcacgccctcggtacggcgcgctgcgccgagctggattatcaggaaggtgcatttagttcgctagcgctggtgttatgcgggataattacttcgctgatcgcaccgttccttttcccgattattctggcagtaatgggctaaaatttgcgatgcgtcgcgcattttgatgtaagtttcacgcgttgcataattaatgagattcagatcacatataaagccataacgggttcgtaaactgttatcccattacatgattatgaggcaacgccatgcatccacgttttcaaaccgcttttgcccaacttgcggataacttgcaatctgcactggaacctattctggcagacaagtacttccccgctttgttgaccggggagcaagtctcatcgctgaagagcgcaacggggctggacgaagacgcgctggcattcgcactacttccgctggcggcggcctgtgcgcgtacgccattgtcgaattttaatgttggcgcaattgcgcgcggtgtgagcggaacctggtatttcggtgccaatatggaatttattggtgcgacaatgcagcaaaccgttcatgccgaacaaagcgcgatcagccacgcctggttgagtggtgaaaaagcgcttgcagccatcaccgttaactacacgccttgtggtcactgccgtcagtttatgaatgaactgaacagcggtctggatctgcgtattcatctgccgggccgcgaggcacacgcgctgcgtgactatctgccggatgcctttgggccgaaagatctggagattaaaacgctgctgatggacgagcaggatcacggctatgcgctgactggtgatgcgctttctcaggcggcgattgcagcggcaaaccgttcgcacatgccttacagtaagtcgccaagcggtgtcgcgctggaatgtaaagacggtcgtattttcagtggcagctacgctgaaaacgccgcattcaacccgactctgccaccgttgcagggagcgttaattctgttgaatctcaagggttatgattacccggatatccagcgcgcggttctggcagaaaaagccgatgcgccgttgattcagtgggatgccacctccgcaacgctgaaagctctcggctgtcacagtatcgaccgagtgcttctcgcttaagcctggtgccggatgcggcgtgaacgccttgtccggcttgccagccctctcctggtgtcgaaattcccggcaaacagtttgccgtttcttgcgcaaaaccagcgggtaaagtagcctgatggaaattttccttagatcgagtctcctgcatgttaaagcgcgtgttcctcagcctgttagtcctgatcggcttgctgctgttgactgtgctcggcctcgatcgctggatgagctggaaaaccgcgccttatatctacgacgaattgcaggatctcccctaccgccaggtcggtgtggtgctcggaacagcaaaatattatcgtactggcgtaattaatcagtattatcgctaccgcattcaaggagcgattaatgcctataacagcggtaaggtaaattatctattactgagcggcgataacgcattgcaaagttataatgagccgatgaccatgcgcaaagatttaatcgctgctggtgtcgacccatcagatattgttctcgattacgcaggctttcgtacgctggattccatcgtgcgtacacgcaaagttttcgatactaatgatttcattattatcacccaacgtttccactgtgagcgggcattatttattgcgctgcatatggggattcaggctcagtgttatgccgtaccgtcaccgaaagatatgctgtcagtacgtattcgcgaatttgccgcccgtttcggtgcgctggctgacctttatatttttaaacgtgaaccgcggtttttagggccgctggtccctattccggctatgcaccaggtgccggaagatgcgcaggggtatcccgccgtcacacccgaacagttacttgaattacaaaagaaacaaggaaagtagttatggatgtacagcagttttttgtcgttgccgtttttttccttattccgatattttgtttccgcgaagcatggaaaggctggcgcgcaggcgcgattgataaacgggttaaaaatgcaccggaaccggtgtatgtctggcgagcaaaaaatcccggactctttttcgcttatatggtggcatatatcggcttcggaattttatctatcggcatgattgtttatcttattttctatcgttaatattttctcttttctgttaattattgagaataattattacttcactcaataagctgcggatataacattctgaaccgcagctatttgtgaatcctttcacagtataaatttccccacgcgcatagccttaatatcagcacgcaatatttatactctaaataattcgagttgcaggaaggcgacaagtgagtgagtccccaggagcttacataagtaagtgactggggtgagcgaacgcagacgcagcacatgcaacttgaagtatgacgagtatatttagcgttcgccttaattactcatagcattaaggaagatcacatgccgcaacaaaattatctggatgaactcactccggcttttacgcctttactggcgattaaagaagcctctcgctgtttattatgtcatgacgctccctgtagtcaggcttgcccggcacagaccgatccggggaaatttattcgctcaatctactttcgtaattttaaaggcgctgccgagacaattcgcgaaaataatgccctcggtgccgtttgtgccagagtgtgcccgacggagaaattatgtcaaagcggttgtacccgtgccggtgttgatactcccattgatatcggtcgcttacagcgttttgttactgattttgaacaacaaactgggatggaaatttatcagcccggtactaaaacgctcggcaaagtcgcgattattggcgcaggtcctgccggattgcaggccagtgtaacactgacaaaccagggttatgacgtcacgatttatgagaaagaagcgcaccccggtggctggttgcgtaacggtattccgcaattccggttaccgcaatcagtgctggatgcagagatcgcccgtattgaaaaaatgggcgtgaccattaagtgcaacaacgaagtcggtaacacactcacccttgagcagctgaaagcagaaaaccgcgcggtactggtcaccgtggggttatcgagcggttccgggttatcgctgtttgagcatagcgacgttgagattgccgtggacttcctgcaacgtgcacgacaggcgcaaggcgatatcagcattccacaaagcgcattaattatcggcggcggtgatgttgcgatggacgtagccagcacgctgaaagttctcggctgtcaggcggtaacctgcgtagcgcgtgaagagttagatgagtttccggcaagcgaaaaagagtttgccagcgcccgggagctgggcgtttcgatcatcgatggattcacgccagtagccgtggaaggcaataaagtcacgtttaagcatgtacggttaccgggcgaactgacgatggcggcagataaaattattctcgccgtcggtcagcatgccagactggatgcctttgcggagttagagccgcagcgtaacaccatcaaaacacaaaattatcagacccgcgatccgcaagtctttgctgctggcgatattgttgagggtgacaaaaccgtggtctatgccgtgaaaaccgggaaagaagccgccgaggcgattcatcactatttagagggagcttgctcatgttaacgaaagatctttcgattactttttgcggcgtgaagtttcccaacccgttctgcctctcttcttcgcctgtaggcaactgctatgagatgtgtgccaaagcctacgacacaggttggggcggcgtggtgtttaaaacgatcggcttttttatcgccaacgaagtctcgccgcgttttgatcatctggtgaaagaagataccggttttatcggcttcaaaaatatggagcagattgctgaacatccgttggaagagaatctggccgccctgcgtcagctgaaggaagattacccggacaaagtattgatcgcttcgatcatgggggaaaatgagcagcaatgggaggagctggcgcgcctggtgcaagaagctggcgcggatatgatcgagtgtaacttctcctgtccgcaaatgacttctcatgcgatgggtagcgatgtcgggcaaagcccggagctggtagaaaaatattgtcgggcagtgaaacggggttccacgctgccaatgctggcgaagatgacgccgaatatcggtgatatgtgcgaagtggcgctggcggcgaagcgcggcggcgcagatggcattgcggcgattaacaccgttaaatccatcaccaatatcgatcttaatcagaaaatcggtatgccgatcgttaacggaaaatcgagtatttccggatattccggtaaagcggtaaaaccgatcgccctgcgcttcattcagcagatgcgcacccatccagaactgcgcgatttcccaatcagcggtatcggcggcattgaaacctgggaggatgcggctgagtttttattgctcggcgcagcaacgttacaggtgaccaccggcatcatgcagtacgggtatcggatagtggaagatatggcaagcgggttgtcgcattatctcgccgatcagggatttgattcgctgcaggagatggtaggtctggcgaataacaatattgtcccggcggaagatttagaccgcagttatattgtctatccccgtatcaatcttgataaatgtgttggctgtggacgctgttatatttcctgttacgacggcggtcaccaggcgatggaatggagcgagaaaacccgcacaccgcattgtaataccgagaaatgtgtgggttgtctgctttgtggtcacgtctgcccggtgggttgtattgagctcggggaagtgaagtttaagaaaggcgagaaagaacacccggtaacgttgtaaaaccagagacgcatccggcatttggcaccgattgccggatgcagcgcatccggcaatatccacaatcacatcacttcttacgcgcgtatttcagtgaatccagcgctacggcgaagataataatcgcccctttgatgatgtactgccagtatgggtttacgccgatatacgtcaggccatagttgatgacggtaaaaataattaccccggtcaccacgccaatcaccgtccccacaccgccgctgaacgatacaccgcctaccacgcacgccgcgatagcatccagctcatacataaagccgaggttgttggtggcagagccgatacgtccggcttctaacatcccgccaaaggcatagaacacgccagacaacgcgtagatcatcagcaggttcaggccgacgttgacaccagatacttttgccgcttccgggttaccgccaatggcaaaaatgttcttaccgaagcgggttttgttccacaacacccagacgaacgccaccgcaatcaacgcgtagaaggtgatgtaagagagacggaaactccccagcgcgacaaagccctgagcaaaggtagagaagccactgtcaaaaccagaaattggcgacgccccgacaaagtcgtaatagagcgagttgatgccatagacgatgatcatcgtgccgagcgtggtaatgaacggcgtcacgttgagataagcgataatcagaccgttgatcaaaccgatcaccgcaccaatggcacagacaatcagaataaccagcgcaatcggcatcgtcgccatttccgggaacactttgttggcgttatccatggactgcaataatgtcgcagccaccactgccgccagccctacctgacgaccagcagaaagatcggtcccctgggtgacaattaaccctgccacaccgagcgcgataataatacgcaccgatgactgggtgagaatattacttaagttcaacagacttaaaaatgttgggtcctggaaaataataatcgccagcaaaactaaaagaacgacgtaaataccgccctctttcaggtaagtaagaaaacttttcttatttaacgcactcatgggaagcccctaatcttaaaggtgcaaagacgcaagacgcagaatttcgttttgcgttgttgtttttgtatcgacaattccggaaacgagaccattgctcatgaccagaatacggtctgttatccctaacaactcaggcatttcagaggagataataataatccccttgcctttcttcgccagttcggcaattaactgataaatttcaaacttcgccccgacatcaataccgcgcgtcggttcatcgagcattaatatttctggttgcgttagtagccagcgaccaataatcaccttttgctgattaccaccggagagcgaaccaatttgcgtccgatgacccggcgtttttacccgcatcgaatcaatcacccactgggtatcgcttttcatccgcgagttatccagtaaaccaactttatttttgtagttgcgaatattggaaattaacgagttaaaaccgatatccagataggcataaattcccgttgagcggcgctcctcagttaccagagcaaatccgtggtttatggcttcattggcattatggttattgatctttttgccgtgcaacgtaatggtgccagccgatttctcgcgaataccaaataacgtctcaacaatatcggtacgtttcgcccccaccagcccggcaataccgaggatctcccctttatgcagatcaaacgagacatcgcgaatcgacggctggcgcagtgacgtcaggttacgcacctcgaggatgacttcgcccggcttgttttctttgtcagggaaacgctgattaagagaacgcccaaccatcatggcgatgatcttgtccatcgtcagtcctgccagcggttcggtggcgatccactgaccgtcgcgcaatacggtaacttcatcacataactggaagatttcttccattttatgcgagatataaacaataccgcagccgcgctcttttaatttacgaataatagtgaacagatgattgacctctttttcggttaacgaagaagtcggttcatccataatcacaattttcgcgttataggaaaacgctttggcgatttcgatcatctgcatttgcgaaacggataatgtgccgacgcgcgcacgcggatcgatatcaatatccagttcgtcaaaaatcgctttggtttcgcggtacattttgtcctgatcgacaaacatgcctttggtgggatatcgccccagccacatgttatccatcaccgaacgttgtaataccaggtttaactcctggtgtaccatcgaaataccattttccagtgcttctttggcagaatggaaatcgatctctttaccctggaataaaatggtgccggagtctttttgataaataccaaacaggcattttaataatgttgattttcctgcaccgttttcccccattaatgcatggatagaatgtggccggacttttaaattaacgttatcaagtgccttaacaccaggaaaggacttgttgataccgctcatttccaacaagtattccccggaggacggagtcgttgagctgaccatataattttaccttgttggccatacaataagggcgcagtaatagactgcgcccagtcagtcttatttcttgctgaattcagccaggttgtctttatctacgccaacataaggaacgcggaccactttgttgtcgattttccagttggtgccatcagccgcacctttgccatcggccaggtttttcgccagatcaaaggtcgctttcgcctggttgttagcatcgttcagtacggtgcccgccagtgcaccggatttcaccagcgccagcgcttctggcagcgcatcgacgccaaacaccggaatgctggacttgttgtgtgctttcagtgcttctaccgcgcccattgccatcgcatcgttgttggcgataaccacttcgattttgttggcgttcgggccagacagccaggcgtccatcttatctttcgcctgagcggtatcccacatagcggtatctaactgtaactgttcagttttaatgcctttgtcgttcagctctttaatcacgtaagtggtacgtgcttctgcatccggatggcccggttcacctttcagcaatacgaattgaatctgaccgtctttgttcagatcccaaccctgattcgccgcccagtgtttagcaatcaaatcgccttgaataatgccggactctttggagtcagtgccaacgtagtatgctttgtcgtagctatccagcgccttacgagacggttctttgttgaagaaaaccaccggcacgttttgcccacgcgctttctcaatcaccgtacccgcagctgccgggtcaaccaggttgattgccagtgccttcacccctttcgccagcaatacgtcgatctgatcgttctgcttggactggtcattctgagaatcattcatcagcagctgaacatctggcgcggctttcgcatcttgctcaatagccttgcgcactacagacataaagttatcgtcgtacttatagattgttacaccaatgcgagtatcagcagcgtgtgcagcggcaccgaataacatgctggccatcacagcagacagggttaacaccttcttattcatggtatctccggtttttcttatgcagggtagtgcttgagataaatgctcggcggggcagtagagttaatgaagtgttactgaatgccgaagctcactttttaaaattcgttcttccatgcccggtaacgctccagaaaacggctttaattgttgttatgacgctattacctcggtgaaagtgattattcactgttacatacgggttacaacgttaaaacggtgcaatcatagctatcacattgttaagatactgtgaaatcactcacagattgaaagcggttacatcgcctgatttgttgagttagtgatcgtcgccgcattctggcgtgttgcgacagaatggcgacgcactaacgtcggcataaaacagtggctggcacgaggatcaatattgcctgctgccccctgcaaggccagttcggtggctaatttagccattgaagcaatgggataacgcacggtcgttaattgcgggtcggtgtaacgggcgatgggaatatcatcgaaaccgatgattgagagatgtaacggaatcgcaatgccattatcttttaatgctgtcagtgcgccagcggccatattgtcgttataagcaaatatagcggtaagttgtagattgcgccccagcagttcaaccatcgccgcctcaccgcccggcatgtccggcgaaccagtgccaatccagctttccggcggaataatatcctgctctttcaacgcactcatccagcctgctttacgcatggcgtcatcttcaatgccgtggctggaagaaagataaccaatacgttgatgaccgttattcagcaacatgcgcgtcgccattcgggcaccgctgagattatccaggcaaacgcaacgatgggcgtaccccggcacaacgcggttgattaacaccataccgggaatgttatccataaattgcgccagttcatcgtcactcaatgcttttgagtgaacaatcaacgcattacaacgctggcgaattaacacctcaatggcgtgacgctctttttccgcttcatgatagctattgccgattagcacgtatttctgatgctgctgggcgaccagatccaccgcttttaccaacgcgccgaaaaacgcatcagaaacgtccatcaccaccacgccaatggtgtcgctaacctgagttgccagcgcctgggcattggcgtttggcctataatccagctcactcacggctttcattactgcttcacgcgtgtcggcactgaccagcgtgctgttattgagcacccgggaaaccgttgccacagagacgccagcctgacgcgctacatcacgaatggtgatcatattcactacctgttatgagattgcagtaaatgactgcttgctggcggctattttgtcagcactgaatacaggacttcgtgaatcgagtcacagcaatggaaacggttacagccgttttgttaacgaatgtgatccagaacgttatcttgatgttttagatattgccgttccggcagcacgcaaagttaactgacgccagagccattccaccggcccctggcggaagtaacgcagccagataacagagaagaggatattcgccagccataccggaataacaaacgccagcagctccaggcgatcaaaatgcataaacaaaccgaggtggtaaaaaagcgtggtacaaatcagcgtttgcaatagatagttggtcagcgccatccgtccgacgcaggcgattgccagcaccagcttaaagcggcttaattgcggccagaagccataaaacagcgacgcatagccaatcgcctgaaacggcgcactcagttcccgcggcatttgaagtaagaaggcacaccagcgatacgcccagtccagctgccattgcagggcgatggcaggaaggttaatggtcaccccaatcgccaccagcacaaaaccagtacgacgatagtgacgtaagctgaactgccctttcagccagccgctgcgcatcagcgccgcaccaatgagcatcatcccagccagttgccagccatactgtgcgcccagtgccagtaaactgttgccaacaccatcggcacgattactgatcgcatcaacgccgccgtgaagcttccagtatttttcatacaaaatagccgatgcatccggcgtccaggcgcggctggtctggctgtcggaaatcagccccaataacagcaaaacgccaagccccaccagataaagcatgacgccggtattaaacaggctttttaccgatggcgcatcgcgcaccagccgccagcagattaagcccaccagcccgtaagccagcagaatatcgccgtcccagaacaataaaccgtgaataaagcccaataagactaacagcgttaaccgcgactggatccagcgtctgccacggggcagcaacatttgcagtccagcaccaaacagcagcgcaaaaagcgtgaggaatttcacctggccgatgagatcaagaaatgcccaggtccatgcatcctgcggcgtaatagcaccgtaccaggcgggattgagataagccgcctttggtagcccaaaggcgctgatgtttaatagcaggatccccagaatggcgacgccgcgaacaaaatcgagcgtgacgttgcgctccatggttcctgccttttaatcagttgtgatgacgcacagcgcgcagaaactcgtggcgcgtattctgactggatttgaacaatccaccaagagaggtcgttgttgtggcactggttgcatcgcggatgccacgcgccttcacgcagtaatgcaccgcgtcgatcgagacagccacgttattggtgcccagcagcgtttgtagcgcaataagaatttgctgcgtcagacgttcctgcacctgcggacgctgggcaaagaactgcacgatacggttaatttttgacagaccgatcaccgaatctttcgggatataagccaccgtcgctttgccatcgatggtaacaaaatggtgttcacaggtactggtcagagtgatatcgcgcacggtgaccatttcatcgaccttcattttgttttcaatgagggtgattttcgggaagttggcgtaatccagaccggagaaaatttcatcgacatacattttagcgatgcgatgcggcgtttccatcaaactgtcatcagccaggtcgagattcagcagctgcatgatttcggtcatatgaccagcaataaggcttttgcgcgtttcgttatccatttcatgcacgggcgggcgcagcggtgtttccagtcctcgcgcaactaacgcttcatgaaccagggccgcttctttactgagtgatggcatttatgatttctcctgcaggtgtgacgcctccgccctgcgtgggggcaaagttattaagctgatttacagcctgattattgtgcgtgaggcggcgcacataatccagtattcacagcgataattattgtaattgccgctgcctttcatcagcagatgttaaaacatcgttatgcaaatacggaagtgaaagttactcacagcacattgaataaacggtatgatgaagaaattgcaaacaacacaacaaggagccacgcatggaaatgctcgaagagcaccgctgttttgaaggctggcagcaacgctggcgacacgactccagtaccttaaactgcccgatgacgttcagtatctttctcccaccccctcgtgatcacaccccgccaccagtgctgtactggctttccggattaacctgcaatgacgagaacttcaccaccaaggcgggtgcccagcgcgtggcggcagaactggggattgtactggtgatgccagacaccagcccgcgcggcgaaaaggttgccaacgacgatggctacgatttaggccagggcgcaggcttttatcttaatgccacgcaaccgccgtgggcgacgcattaccggatgtatgattatctgcgcgatgaattaccggcgctggttcagtcgcaatttaatgtcagcgaccgctgcgccattagcggtcactcaatgggtggtcacggtgcgctgattatggcgctgaaaaatccgggtaaatacaccagcgtttcggcctttgcgccaattgtgaatccgtgcagcgtcccgtggggaatcaaagcgtttagcagctatttaggtgaggacaaaaatgcatggctggaatgggacagttgcgcgctgatgtatgccagtaacgcgcaggatgcgatcccgacgcttatcgatcagggcgataatgatcagtttcttgccgaccagttgcaacctgcggtactggcagaagccgcgcgccagaaagcgtggccgatgacgctgcgtattcagccgggatatgatcacagttactacttcatcgcctcttttatagaggatcacctgcgcttccatgcgcagtatttactgaagtgaaagtccgcccggttcgccgggcatcttctcatcagaagcgataatccactgccataaagtaacgacgtccgtcttcgttatagctgtagtcgtcacgactgagatccttgtcgccaaggttcagcacgcctgcgcgcagtttgacgtctttagtcacctgccaggccgcgccggtattccagatggtataaccgcccggtgttttagccgtcgcgctgtcggcgcgtttctgcccggtatagtgaccagaaacatagaatgaccagtcttccagcgccagcggtttccagtccagcgtaccgttagcagtatggaacggcagatcggatagcggtttgttttcgccgttgctgacatcacgaccatcgttgtaggtgtagttgatcgacagtttccattcatcgttgaacggaattttcagttcggtttccacgccctgaatacgagctttgttaacgttgtagtagctaaataccggtatgcgccgtccgttagcgcccgtctcaaaaccaacaaagttttggtagcccggtgcagcgttgacgtcagacgtacggctgatgctgatacgatctttcacatcgttacggaaaacggtaacgctggattcaaccccttccagccagccttcttcacccatgtagtaaagccccagctcccaactttcgctggtttctggtttcagatccgggctacccacaatcttacatgcgccacggcaggaattgctcgtccagtcagggctaagttgcaacagagaaggtgctttaaatgccgtcgcccagccccctttcaccgttacggtgtcggtggcgttataaaccaggtaggcacgcggactccagtgttcaccgtaggtttcgtgatcgtccatacgcacgccggtcgtcagcgccagcggctcgaagatccgccattcatcttccacaaacagcgcgtactggctggcagacgttttggagctggttcccccggtcaggttcaccgcatcgctaagtttgtcgtgacgccattcaccgccaaccgtgagaaactgattaatcgccgtcagcggcaacgtgtatttgccgtcgaccgtattgctttcggaagttatcgggctgctgttgccagggtttttgttctcgactttctcaccgtagtatttcagttcgctggtgccgtaatcccaacgcccattatggctgacggagtagttctggcgttccaggcggtttttgtccagcgagtcggaatcacgatcctgacggtcgaaaccgtatccggcagtaaaatcgtgattttgattcggtgtccaggcaaattcgacattgccgtcgcggctggagaatccttcaatacgcggcgtttctccggtatcggtggtcgttgagttttgcgggtcatccttttcacgttttgccaggctgccgtaagctttcattcccagcacaccatcaattaatggtccactggtaaagaactgaccgttataggtatcaccgcgatcgcgatgttcctgaatggtggtatcgacggtaacggtacccgaccatttctgaccgattttttggtgatgatattcactacaccgccgagcgcatcggagccgtatagcgacgacatcgggccacgaaccacttcaatacgttcgatggaatcgaccgggatccagttcagatcgaaatcattgtggcggaagacggcattgcgggagttaacgcgtttaccgtcgacgagaatcagggtgtagctgctgtccagaccacgaatactaacgcccttacggttatccccttcgttcgtcagttgtacgccaggcacttctttgaggacatccttcagattctgtaccggttttcgctgcaggtcttcctgggtaatgacgctgatactggcgggtgcatctttgaggttttgttcaacggaagatgcagtgacaaccatcgtttcgccatcatcatcgaccgctaacacaggccatgcacaagaaatagcggacaaacacagcccgacccgtacgaaagggttcaacctaaacattccatatctccatgaggtaactacgaaaataaaatgggttatcgctcacatcttcttcacgtccccttgcgtacggcagcatcgcggtggacttatttgtatgcaggtgatcatcccagaaagccggaacagcctctgatttgtcagccttttttgattgcggcgtaacgataatgcaaacgataacaattatcaatccaaatgttaaattttatatccgcatgatttgtcagggaaatggaattgaaaaagccctctcggttgagagggcttagcaaggaagggaggaaacttatttcttatcgttctgcgggaacttcatttcgctgtaacgtacgaagtgagttcctttaatcagcttgtagccgaaccaaataatcaggaacagcgggataccaatatacgttgccgctacgccgccccagtcaatggtatctttcaggaacgcttcgtagttctggcccaaagtgataatcagacacagaatgaatgcgaagatcggccccagtgggaagaaacctgaacggtacggcagatcgttaatgtcgtgtccctgcaatacgtaaccgcgacggaagcgatagtggctaatggcaatccccagccaggcgataaaacccgtcatcccggaggtgttcagcagccacaggtataccgtctggttgccaaacatggaggtcaggaagcacagaccggcaatcaccgtcgtcgcatacagcgcattacgcggcacgccaccacgcgacagtttagcgaaaatgcgcggcgctttaccgtcacacgccagggtgtacagcatacgagtagacgcatacataccggagttacccgctgacagcaccgccgtcagaataactgcgttcatcaccgccgccgcagagagcagacccgcgtgctggaacaccagggtgaacggactaacgctgatgtctttaacatcgttacgcagcaggctcggatcggtgtacggaataatcaggctgataatcaggatcgcgaacacatagaacaacaggattcgccagaacacctgacgtaccgcgcgtggaatgtttttcgccggatcttcggactcgcctgcagcaataccgatcagctcggttccctggaaagagaagccgacaatcatagctacgccgatcatcgccgcaaaaccaccagcaaacggcgcttcgccgattgtccagttgctccagcccgcaggctgcgcgcctttgaagataccgataatcatcagcacgccaacgatgataaagacaataactgtcgtgactttgatcagtgagaaccagtattccgcttcaccaaagccacgaactgagatgtagttcagcaggaagataacgccgaggaacaacgcactccagatccagcccggtgtatccgggaaccaccagctcatgaccagctgagctgcaaccaggtcaacggcgatagtcaccgcccagttgtaccagtagttccagcccagcgcgaagccaaagccttcttcaacatagttctgaccgtaagtggcaaacgaaccggaaaccggcatatatgcagccagttcaccgagactggtcatcaggaagtaaaccatcaggccaatcagcatatacgagagcaatgccccgcccggacctgcctgagaaatcgttgcgccagaggcaacaaaaagacctgtaccgatggaaccgccaatggcaatcatcgtcaggtgacgcgcctttaattcacggcgtaagcccggcgcttctgtggttttagtttcggaaaccatacaaaaatgctatccatcttaaaaatgaggcgcgattgtagcagacgattggcaatccttccggcagaaatacacggttataagacaccttcatgatcgcccagggattataagtaaagcagccaatctcttttctggcgaatgcatgctgagggcgctgcgtcacgaaatcgacacagcaccagcatgttcttgtacagcaacttaacgcggtacattcgcgggatcgcaatagtccagaaagcgccgtagcgcgttggaaaggtgtttttgccgatgatgtatacgccacaacgtacgcatcaggcgcggcagagggaccgcaacttcacttaatgtgcctgcctgcaattgatcttcaatcacccgtcgcgacaggcaactaattcccaacccatgacgcaccgcatgtttgattgcctcggagttacctaattccatcgccatctcaaacttcggtaaatgtgacagcaatagataatcgacaatctcccgcgtgccggaaccgcgttcacgcaggatccacggcgcagcggccagctgctctaaggtgaccggaccacgggccaacggcgaagtcggcgcggcgaaaaccaccagctcgtcttccagccacggttcagaaataatttcagtgctgtggcacggtccttcaataaaaccaatatcaacgcggaaatccagcaccgcttgcatcacgtcctggctgttcccaacgctaagttcaatcggcaactgcggataatcatggcgataacgggcgataactgcaggcagaatgtagttaccgatggtactactggcatagatacgaatcgcgccgttgtcttcgcgaaacagttgttcgatttcaaccgcctgttcaagcaatgccaacgcacgcggatagagcagccgcccgtgttcattaacaaccagtcttttccccacgcgatcaaacagttgcacgccaagctgcccttccaggtcggtcaaggctgcgctcactgctgattgcgacaacgccagcatcaccgacgctgggtggttgatccacttttcaatacttctgcaaaaacttccaactgccggagggtgatgtgcatagtcgcttaccacttataaagattaattataaatatataatcaattttatttttaaaccagttagtcgtaaccttatgcccggttaaaggagagggttatgacgaatatcaccttacagaaacaacatcgtacactgtggcattttattccggggttagccctgagtgcagttatcaccggggtcgccctgtggggtggttccattcccgcggttgcgggtgccgggtttagtgccctcaccctcgcaatcttgttggggatggttttaggcaacaccatctatccgcacatctggaaaagctgtgacggtggtgtgctgtttgccaagcaatatttattacgtctgggtatcattctttatggcttccgtctgacgttctcgcaaattgccgatgtcggtatcagtgggatcatcattgacgtgttgacgctgtccagtaccttcctgctggcttgcttcctggggcagaaagtgtttggtctggataagcacaccagctggttgatcggtgccggtagcagtatctgtggtgctgccgcggtactggcgactgagccggtagtgaaagcggaagccagtaaagtaaccgtggctgttgcaaccgttgttatcttcgggaccgtcgcgattttcctctacccggcgatatatccgctgatgtctcaatggtttagtccggaaactttcggtatctacattggttctactgtgcacgaagtggcgcaggtggtggcggcaggtcatgccatcagcccggatgcggaaaacgcagcagttatttccaaaatgctgcgcgtgatgatgctggctccgttcctcatcctgctggcggcgcgtgttaaacagctgtctggggcgaacagcggcgagaaaagcaaaatcactattccgtggtttgccatcttgttcatcgtcgttgccatctttaactcgttccacctgttaccgcagagcgtggtgaacatgctggtaacgctggataccttcctgctggcaatggcgatggcggcgctgggtctgaccactcacgtcagcgcgctgaaaaaagccggggcgaaacctctgctgatggcactggtactgtttgcctggctgattgttggtggtggtgcgattaactatgtgattcaaagcgtcatcgcataaaccactacatcttgctcctgttaacccgctatcattaccgttttcctccagcgggtttaacaggagtcctcgcatgaaatacattggagcgcacgttagtgctgctggcggtctggcaaatgccgcaattcgcgccgccgaaatcgacgcaaccgcgtttgccttgttcaccaaaaaccaacgtcagtggcgtgccgcaccgctcacgacgcaaaccatcgatgaattcaaagcggcctgtgaaaaatatcactacacatcggcgcaaattcttccccacgacagctatctgattaacctcggacatccggtcactgaagctctggaaaaatcgcgcgatgcctttatagatgaaatgcagcgttgcgaacaactggggctttctttgctcaacttccaccctggcagccatctgatgcagatttcagaagaggattgccttgcgcgtattgccgaatccatcaacattgcgctggataaaactcaaggtgtaacagcggtgattgaaaacaccgccggtcagggcagtaacttagggtttaaattcgaacatctcgcggcgattatcgacggcgtggaagataaatcccgtgtcggcgtctgcattgatacctgccatgctttcgctgccgggtatgatttgcgtactccagccgaatgcgagaaaacgttcgcggattttgcccgtattgttggctttaagtatctgcgcgggatgcaccttaacgatgcgaaaagtacctttggcagccgcgttgaccgccatcatagcctcggtgaaggcaatatcggtcatgatgcgttccgctggatcatgcaggacgaccgtttcgacggcattccgctgatccttgaaaccatcaacccggatatctgggcagaagagatcgcctggctgaaagcgcaacaaactgaaaaagcggtggcctgatcgatgaacgacagggaaaagcagattcttaaaattttacggcgtaacccgctgattcaacagaatgaaatcgccgatattctgcaaatcagccgctcacgtgttgccgctcatattatggatttgatgcgcaagggtttgattaaaggcaaaggatatatccttaccgagcaggattactgtgtggttgtgggtgcaatcaatatggatattcgcggaatggcggatatccgttacccgcaagcagcctctcatccaggttctgttcactgttccgcaggcggcgtcggacgtaatatcgcgcataacctggctctgcttggtcgggatgtgcatttaatatcagctattggcaacgatttttacggcgagacattactggaagaaacgcgccgcgcgggcgtgaacgtttcaaactgcattcgtctgcatggacacagcactgcaacttatctcgctatcgctaataagcaggaagaaactatcctggcaatcaatgacacacatattctgcaacagctaacgcctcaactgctcaatacttcacgggacttgattcgccatgctggtgtggtgctggctgattgtaatctcacacctgaagccctggagtgggtctttaccattgctgatgaaattccgatgtttgtcgataccgtttccgaatttaaagcgaacaaagtaaaaaactggtacagccggatccacactctgaaaccaacacaaaatgaactggaaattttgtgggggcaaccgattaaagacgacaacgatcgcatcagagctgtaaattcgctgcatcaacaaggtgttaaacgcatttttgtttatctgaaagatgaatctgtattttgcagcgataaggatggagaacaatttttgctgaccgcgccagcgcatacgacagtagacagttttggtgctgacgatggttttatggcgggcctggtatatagctttcttgaaggatacagtttccgcgacagcgcccgttttgcggtagcctgcgcggcaatttcgcgcgccagcggcagcttaaacaaccctaccctgtctgccgataacgcgctttcattagtgccaatggtgtaacaatgttgccggattcgacgcttgaccgcatcttatccggctcataaattgagcactacgctaaaccaataaagaatcctgcaatagtagcactcatcaggttagaaagtgtcgccgccgccagcgcgcgtaaaccaagttgggcgatttccggcgcacggtgtggcgcaaccgcagaaaacgcctccaccaccaccccgatagaaccaaagttagcgaaaccgcacaacgcgaaagaaataatcgccacggttttagcatccagagtgccacccgtttgcagatatggcgagaaattgagataagcgacaaattcattgatcgccagcttctgcccaatcaaactcccggcaagatttgcatcactccagtcaacccccatcacccacgccaatggggccaacaggtaacctaaaatggactccagcgaggcatgtgcaaaaccaaaccagccgccaacgccgccgataataccattaattaacgcaatgatggcgacaaatgccataacaactgtcgctacaccggcggcgattttcagcccggtcattgcccctgtcgcagcggcttcaataatgctttttggcggtgtttcggtgaaagagaggttattaaaggaaacctgcgaagattccgtagccgggcttaacaggcgggcaaacaagatcccgccagggatcgccattaacgatgccgccagcaaatattccacaggtacgcccagggcggcgtaaccaatcattgtcgaaccagcaatcgaggccatgccactacaaatcgctgtaaataattcattgcgattcagacgatcgataaagggtttgacgatcgccggaatttcgttttgcccgaggaaaatggtggtgaccgcgacgaatgactcgatcttgctgatatttaacgctttctggaagataccgccgagaatgcgaattaaaatccccatcacaccgatgtagtagagaatactcaccagtgctgtaacgaagataattgccggtaatactctgaaaccaaagataaatcctgcgccatcaaacagcgtgtccattttcggcccgaccagcgaaccgaagataaatgcgctacccgcgtcgctgtacgccatcactttatgcacgccaaaagcgactttttcagcgacccaacgccctggcggtaaccaaagcataatgccgccaatcacaacctgtaacactaacgccgcgccaacggtacgcaggctgatcttcttcttgtttactgacagcaaaaatgcaattgccagcaataccaccattcccagaacacttctcatgacatccatagtgattatctcttcatgtcatattgggcgacggctttctgcccatcagaaatagccgggcctgcatcttgcgctatcggcccggcttgttatcaacgcttaatgggttttgatgtagccgcgcacgcactcttcgactaagccccagaaccagtcggtatcaatagtgatgccgactttggtattggcgggcttgccaagaacgcccagctcgtcgcagacggtgcgcccatagcaagggccactgttgacgtccacttcgacgtacatctcctgggttttaatgccatcagggttaatcagataaccgatgcaggtggcgtcgtgcaccgggccgccagccaggccgtagttttcgaactgcgttttgagagtgaagttcatgatgtcgctgaacagctctccggcagggccgcctgccctttccatccgagcaatcacgtccggggtgcaaacggtctggttggtgagatcgaggcccatcatcactaatggaacgccagaggtgaacaccacgcgggctgcttccgggtcagcaaagatgttgaactcggcagatggcgtgaagttgcctgtaccgtaagcgccgcccattagcacaatttcacggattttgggcaggatcgcgggttgcatacgcattgccaccgcgatatttgaaagcggaccaaccggcaccagagtgatatcgccatcgcttgccatcagggtatcaatgatgtatttcaccgcgtgggtactttctgcctggcgggtcagcggctcgaataccgggccatccagtccggtttcaccgtgaatattatcggcaacgatttgttgacgcataatgggttgcggcatccccgcataaaccggaacattaatctccagtttctggcaaacattcaggccattaattaatgttttatcaagcgtctgattacccgctacaatagtgatgcctaataaatctattgccggatgtttcgctgccatcatcattgcaatagcatcatcatgacccggatcacaatccagaataatttttctcttttccattgtttatttcctctgtttccagttgcgttattttttctacagcaaagaaaattcgaccgggccgatgattgaatcttaccaaccgcgtacgtatgctaaatatgagaaatctcatagcggataaacatcgtgaaagaaatccacaataatgatcttaagcagcaattgatgagtgaatccgcgtttaaggattgctttttaacggatgtttcagccgatacgcggctgtttcattttttagcgcgtgactacattgtgcaggaagggcaacagccgtcctggctgttttacctgacgcgaggccgcgccaggctttacgccacgctagctaatggtcgcgtgtcgctgatcgatttctttgccgccccctgttttattggcgagattgagttaatcgacaaagaccatgaaccgcgtgcggtgcaggctattgaagagtgttggtgccttgcgctccctatgaaacattaccgcccgcggttattaaacgacacgctatttttacgaaaactctgcgtcaccttaagtcataaaaattatcgtaatattgtttctttaactcagaatcaatcatttccgttagtgaatcgcctggcagcatttatattactctcgcaggaaggtgatctttatcacgaaaagcatacgcaagcggcagagtatttaggcgtttcttatcgacatcttttatatgttctcgcgcaattcattcacgacggtttattaattaaaagcaagaaagggtatctaattaaaaacagaaagcagttgtcaggactggcgctggagatggacccggagaataaattctccgggatgatgcagtaaaaattatttgcaatagcgcgattgccggatgcaacacttaataagcgcgtacatccggcaatgaaactcaagctaaaccaataaagaacccggcaatggtcgcactcatcaggttggaaagcgttgctgctgccagcgcccgtaaaccaagctgggcgatttccggcgcgcgttttggcgaaatagccgaaaatgcgccaacgacaacaccgatagaaccaaagttagcaaaaccacaaagcgcaaaggagataatcgcaatggttttcacttccagcgtgccgcccgtttgcaggtatggggagaaactcaggtaagcgacgaattcgttaatcgccagtttctgcccaatcaggctacccacaagattggcatcactccagtccacacccatgatccacgccagcggtgccagcacatagccaaaaatactttccagagaggcattggcgaaaccaaaccagccaccaattccgccgataatgccgttgatcagcgcaataattgcgacaaacgccattaccaccgtcgctacaccagcggcgattttcagcccggtcatcgcaccgctcgccgccgcttcgataaagctttttggcggcgtttcgctgaacgacagattttcaaatgtgacctgtgaaggctcggtggccgggctaagaatacgtgcaaacaaaataccacctgggatcgccatcagcgatgccgctaacaggtagtcaattggtacgcccattccggcataaccaatcatcatcgaaccagcaatggacgccatcccgctacaaattgcggtaaacaactcgttgcgattcatgcgatcgataaacggtttaacgatcgccgggatctcattttgcccgaggaaaatagttgtgactgcgacaaaagattcgattttgctgatgttaagagctttctggaaaatgctgccaaggatgcgaatcagcagccccatcacgccaatgtagtacagcagactgatgagcgcagtaacgaaaataatcgccggaagtacgcgaaaggcgaagataaaacccgcaccgtcaaacaagacatccattttcggcccaaccagcgaaccaaaaatgaaggcgctaccggcatcactgtaagacatcactttatgaacgcctaatgccgcctgttctactgcccactttcccggtgggaagtagagcatgatgccaccaatagcgatttgcagcagcagtgcggctccaaccgtgcgcaaactgatgctctttttattcactgacaacagaaatgctattgccagtaacaccaccatccccacaacacttctcattatatccataatgattttcccttcatgccagtaaacccggcgtcagcgccaggttttggtatgcttgatgagtacgggcgacggctttctgcccgtcagaaattaacccgcgagacgctggtattctttggcaatttcactcgccagaatggcgttgttgaacaccagctggatattggatttcaggctgtcaccgccggtcagctcagcaacgcgcgccagcaggaacggtgtactttctttaccaataacgccctgctcttcggcttcggcgacggcttgatctatggctgcattgatagattcctccggcatcgcaaactgttccgggatcgggttcgctaccacgaggccaccgttcagcccgctttgccatttcaccgccattgcacgggcaatttcactggcgctgtcgagacgaatgctgacgtcaaacgagctggtacggcagaaaaacgcaggcagcgctttagtctgatagccaattaacggcacaccgaaggtttctaaatactcagtggttaatcctaaatcgagaatagatttcgccccggcacaaacaacggtgacattagtatttgccagttcttgcaaatcggcagaaatatcgaaggtatgttccgccccgcgatgcacaccaccaattcccccggtggcaaatactttaattccggcaagcgccgcaataatcatcgttgaagccacagtggttgcgccattttttccggcggcaacaacaaaaggtaaatcgcgacgactaactttggtcacgttatgcccttcacgacccagtaattcaatttcttctttgcttaaacccactttcatcacgccgccaataatggcgatagtggcaggtactgcgccctgtttacgaatagtttcttctacttcaattgcggtctgggcattttgtgggaacggcatcccgtgagaaataatggtcgattccagcgccacaaccggttttttgttttttaaagcgtcctgcacttccggggaaatttgtaataattcaggggaaatttttaattcagacattctgcgttctccactaacgatataacgttggcaatcgataaatcggggttattggtgtattcacaggagagcgccattgacgaacatccctgtgcgaaacgaacagattcggcaaacggcattccgtctacccaacacgaagcaagtcccgccatcatggcatcgcccgctccggtaacattaataacattggttttgatcggcgcagaccagccattttcaccgctgatatcgctgtaataaacgccgtcgccgcccatgctcaataccagtcggttcaggccatgttgatggaaccaggcagcaacttttgccacatcgtcacgccctgacagcgcaatcccactcagggtttccgcttcaaggcggtttggcttgagagtgtggatctgatttagacggtcgcgcactttgacacatttccacgctgaaaccggatcgacaaatacgggtacgttggcggcattatccagaatccatgccagtgcctcttcactgatattacagtctgcgacaatgacctttgccctctgaataaattcacggtgctgtgcgagatattcagctgtaatagcgttgctaatattcatgtcatttatagcaaccagcatttcaccggtattatcgagtaatgataaatagcttgacgtattttctcctggcacaatcaggcatttatcgacataaacgccagattgattggtttgcgttagcagcgattgaccataaaagtcactgcctacggcgctcagtagccaggctttgttccccagcaacgccaggttttgtgcaatattgcgcccgactccaccaggcgtaaattttattttacctggatttgaatccgcataatttaatgattcatgtgaatatccggcgacatcaatattcgccgaacctataattacgacataatccttttcgcgcatagcacgtcctctggtaaaaaattaccaaccctgtcaatccacaagaatatagatactgcaaagacggtttaaacatgtgttcatatttaaacatgtgctcatagtatgcatgttttacgtaaagtaaattaccgccagagaggcaaaatgggcagatttgagcaggctcacaaaatgcgattaaatgcctgaattacaaaagcgaggaatttgtgacgggatgcacagaacaggaacactaaaaaagggcagaaaataatctgcccttgaggaaataaccttagtgtttgatgaacgtttcaggtttctactgaaagataaaaccatttaaattcataaaattacatttacaaaccggtcattccctttgcgctcatccaatgatacagggcaggaaatttctgccctgtaacacaccttttattacgctgctttcgctactgcgtccacttccggacgtttcaggaaggcataggccaaacccgccaccagcgtaccggcaataattgctaccaggtaacccagtaccggcgtaatagcgccagggatcagcagaacaaacagaccaccgtgtggtgccatcagtttcgcaccaatcgccattgagattgcgccagtcagcgcaccacccacgatacagcacggcagcacacgcatcggatcacgagcagcaaacggaattgcaccttccgaaatgaagcacagtcccaataccagagcggctttgccaccttcctgctgcgctttgtcgaatttgcgacgcgccaccattgttgccagacccattgccagcggtggcaccatacctgccgccataatcgccgccatcgggccataggtttgagtactcagcagacccacaccgaatgcgtacgctgctttgtttaccggaccgcccatgtcagtacacatcatgccaccgaggatcgcccccagcagaaccgcattcgcagtccccatggtctgcagccagtgagtcaacccttcgagaatgccagcaactggtttaccgatcaggtagatcatcgccagaccgaccaccagactggaaattagcggaatgatcaggatcggtttcagcgcctccatactctgtggcagtttcaattgcgtactgattaacttcgcaatgtaaccagccaggaagcccgcaataataccaccaatgaagccagaaccggtgctgaccgccagcataccgccaatcagacccggcgtgaggcccggacgatcggcaatggaaaaggcaatataacctgccagtaccggcaccatcagcgcaaaggctgaaccaccaccaatctgcatcagcgccgctgccaacgtacccggctctttaaacgcttcgataccaaaagcaaaagaaagcgcgatacacagaccaccagcaacgaccatcggcagcatgtaagagacgcccgttagcaagtgacgataagcgcctgcactctctttcttaccttcagtggtcgccgtttgagttttgcccgccggttcatacggcgttgcttcagcaaccgctttatccagttcctgcgcggttttcttcagcgccagaccggtagaggtacgatacatcggtttaccagcaaatttcgccagatccacttcgatatctgccgccacaatcaccagatccgctgcggctacttcctcgggagtgattgcattacccgcgccaacagaaccacgggtttcaactttcacccaccagccacgttttttcgcttcggtttcaatggcttcagccgccataaaggtgtgtgctacgccagtcgggcaagcagtcaccgcaactacgcgtttcggaccgctggcggcaaccggtgctgtcgcagtgaccggcgcagtgtaaggtttcgcatggcctttggcttcactcaggaacagctcagggtgcgcaactgcccgggaaatatcacccagccagacattttttaccgttcagcgcgctgtcattcgggatggaatcaccgagaacaatcgccatttctgcgtcgttcggattgtcgatgatttccagttttgcttttcgcgccgccgcgcccagcagggtcttcgccatataggcgcgtgcctgaccgagattagcgtcaataatcagcagcgttttcattatgcctctcctgctgtcagttaaaaggttgtaagtcgacgcgcgccatcattgcggccaactgcggacgatcggtaatacccacattgctttgacttaccgccagggcggcaacagctgtcgccagacgcagtgtgtgttcactggattcacgcatcagcaagccataaatcaggccaccaaccatagaatcccctgcgccaacggtgcttacgacatcgactgacggtggtttggcgatccattcgccggaggcattaacccaaagcgcgccttcggcacccagtgaaataacaacatgcgcaataccttgttcacgtagcgcatgtgcagcttcaatcacatctttcatttcaggcagtttacggcctgcccagatttccaactcgcggcggttaggtttcaccagccacggtgccgctttcaaacctgctactaacgcttcacggctactatcaaagataatgcaaggacactgactacgcaggcgagtcatccagtcggtgaacgcttccgggctgacgcctgacggtaagcttccgctgacacagaccatatcgaactgaccgagccagctcagagaatcagtcacaaagcgttcccagtcggcgggggtgacttcaaaacccgagaagttgaagtcggtcacttcgccgtctttttccgtcagcttaacgttaattcgggtgcgcccctgtacaacctggaaacggttggcaatgcccagctcgctgaacagttgttgaaaaccatcctgattgtctttacccaggaagccgccaacggtgacatcaattcccaggtcttttaatactttggccacgttgatgcctttacccgccgcatgcagaccggtggttttcaccaggttcacttcgccgcgttcaatttccgggcagaaaccaacaaggtcataagccggattaagggtgatagtagcaacacgtctgctcattatgcgccctccccaagaccagcagcgatagcgtcgccaatggctttcagcgcctgttcagcatctgcaccctgggcggtaaagcgtaggcgatgacctttcttaacgccaagtgccacaactttcatcagactacgtccgtttgccggtttgccggtaccatcaaggtttgtcacggtaatatcactgttaaattgtttaatggtattgaccagcatggtacctggacgagcatgcaggccgtgttcattgcgcaccacaaactccgcgcttaacacgtcgtcggtcggcgcatcatcgctggtcagcagcgccagcaacgttgccgcatctgctttcagcaagcggtcagctttattgtcgagcaataaatcagcgagacgcttaagaaccgcgatgggctgatcgtcattcatcgccacactcaccagcatggctgccgtttcgccgtccacatcaaaagcatttgccgcacggcttaccgcaatcgcgctacgcagattgccttcggcgctatcgctcagccagataccctgtccgaggttcagcggttgttcattgatggctttggtgacgaaagtggcgtcaactgccctcgcctctttcagacgcgcagcgttcagcgcctgaagagtcagcagatcgctggcggcgatatccagcgtcagcatttcgttgtcgagcttcagctgctcactctgcttttcgcccatcagcaatgcgcgaagttcttctgctgttgttgctgacttcagttgttcagcaacggaatcatcgctcagtacgcgggtcagctggcgtagcaggcccagatgttcatccgagctggcagcaataccgattgccacgtacgctacctgaccgtcaccccaggtgacgccttccgggaactgaaatacctgaacgccggttttcagcacctgatcgcgggtgtcggtagtgccgtgtggaatagcaataccattgccgaggaacgttgaggtttgctgttcgcgcgccagcatgccattgacgtagccttctgctacattaccggcctgcaccagcgccgcagcgacctggcgaatcgcctcttctttgtctccggccttttcgcccggatggatgtcctgtacggataactggaacatagttctcctctcttgctgaattgaaacgattcagcctctatgagaaaaaaagcgccaacctggcttagggttaaagacaagatcgcgctgaaacgtttcaagaaagcataatacttctgtttcagcacgcaaggaaagccgtaaagttatgagcaaaagtttgatgtgctgcacaattttttgccatttttcctaattgctgatgggaaaatccgttatcagcaatttcatttcagcagcgtcagcagccaatcagcaacagtgaaatggcattttgattattcgtggcgcttttgatttcgctgtctgtttattttctgacaagcagcgtaaactccgcgtcttcctcttccagtgatcgaccagcatgcataactcccccgcagtctccagcgcgaaatcgtttgacctgacctcgacggcgtttttaatcgttgcctttctcaccggtattgcgggcgctctgcaaaccccgacactcagtatttttcttactgatgaagtacatgctcgtccggcgatggtgggattcttctttaccggcagcgctgtcattgggattctggtaagtcagtttctcgccgggcgctctgataagcgcggcgatcgcaaatcgctgattgtcttttgctgcctgttaggcgtgctggcctgcaccctttttgcctggaatcgcaactactttgttttgctattcgttggcgtctttcttagcagctttggctcgaccgctaacccgcaaatgtttgcccttgcccgtgaacatgccgacaaaaccggacgtgaggcggtgatgttcagctcttttttacgcgctcaggtttcactggcatgggtcattggcccaccgctggcttatgccttagcgatgggtttcagctttacggtaatgtatctgagcgcagcggtagcgtttattgtttgcggtgtgatggtgtggctgtttttaccgtcgatgcaaaaagagcttccgctggcgaccggcacgatcgaagcgccgcgccgtaaccgtcgcgatacgctgctgctgtttgtcatttgtacattgatgtggggctcgaacagcctgtacatcatcaacatgccgctatttattatcaacgaactgcatcttcccgagaaactggccggtgtgatgatggggaccgccgccgggctggaaatcccgacgatgttgattgccggatatttcgccaaacgtctgggtaagcgtttcttaatgcgcgttgctgccgtgggtggcgtctgtttttacgcaggaatgctgatggcgcattcacctgtcattctgttgggcttgcagctgctaaatgctatttttattggcattctgggcggcatcgggatgctctattttcaggatctgatgcccggtcaggcgggttcagccaccacgctctataccaacacgtcgcgcgtgggctggatcatcgcaggatcagtggcgggcatcgtcgccgagatctggaattatcacgctgtgttctggtttgcgatggtgatgattatcgccactctgttttgcttactgcggattaaagatgtttaaggcgcggtcagcatttccagatcgataagccaggtcatggcctgctgacgcgagttaccgcacatttcagcgctggcttgtaagcctgcacagactttcggtcgcagtggcgaggtgaaaattttacagcgttgctgttcatcaagctgaatgcagggcgtattggcgggcttgccatctggcataccgggaatagggctggaaattgaaggggcagtgcaacacgccccgcaacccggacggcatttcatacgttgttctcttaaggttaaccaccggattgatgagcgcgcacagtaccaccttttttgcaccagcaaaagtgcgaataccacttgcccgaaaggcccgtcgcgagtactttgtcgcgatatttttgacattttcgactacaggaatttttcgatgccaagagcgaacgaaattaaaaaaggtatggtactgaattacaacggcaaactgctgctggttaaggatattgatattcagtcgcccactgcccgcggtgccgctacgctgtacaaaatgcgtttttctgatgtccgtaccgggctgaaagtagaagagcgtttcaaaggtgatgatatcgttgacaccgtgacgctgacccgccgttacgttgacttctcctatgtcgatggcaacgaatatgtctttatggataaagaagactataccccgtataccttcaccaaagatcagattgaagaagagttgctgtttatgccagagggcggcatgccggacatgcaggtgctgacctgggacggtcaactgctggcgcttgagctgccgcagaccgttgatctggaaatcgttgaaaccgcaccaggcatcaaaggggcatctgccagcgcccgtaacaaaccggcgacattgagcactggtctggtgattcaggtaccagaatacttaagcccgggcgaaaaaattcgtatccatatcgaagaacgccgttatatggggcgtgctgactaacttcagccgcatgcagaaaagggatagctcaggctgtcccttttttaatttattataccaatattctattttgcgcttcctgaacaccttacgccctcaattttcactcgttgattgatcgccctcacacttcatcgcattaacaatccagaccaatttcaattgctgtcatataactttacactgtcattgttaatttatcgttactaagacgtgactcctatgaagacaattgcctccgttacgctcccgcatcatgtacacgctccacgctacgatcgccagcagttgcaatcacgtatcgttcattttggctttggcgcctttcactgcgctcatcaggcgttactgaccgatcgtgtgctgaatgcccagggcggcgactgggggatctgtgaaatcagcttgttcagcggtgatcaactgatgagccagctccgcgcacagaaccatttatataccgtgctggaaaaaggtgcggacggcaatcaggtgataattgtcggtgccgttcacgaatgccttaatgcaaaactggattccttagcggcaattattgagaaattttgcgagccacaggtggcaattgtttccctgacgattaccgaaaaaggctattgtattgacccggccaccggtgcactcgacaccagtaatccgcggattattcacgatctacaaacccctgaagaacctcactccgcaccgggtattctcgtcgaagcactgaaacgccgccgtgagcgcggccttacaccgtttaccgtgctctcctgcgacaatattcccgacaatggccatgtggtgaaaaacgcggtgctgggaatggcagaaaaacgttcgccagaactcgccgggtggataaaagaacacgtcagttttccgggaaccatggtcgaccgcattgttccggctgcaaccgacgaatcactggcagaaatcagccagcatctgggggtaaatgatccctgcgcgattagctgcgaaccgtttatccagtgggtggtggaagataacttcgtcgctgggcgtcctgcctgggaagtcgcaggtgtacaaatggtgaatgatgtcctgccatgggaagagatgaaactgcgtatgcttaatggcagccactcttttctcgcttatctgggttacctttcaggattcgcccatatcagtgattgcatgcaggatcgcgcatttcgccatgccgccagaacattaatgctgaatgagcaagcgccgacactacaaattaaagatgtcgatttaacacaatatgcggacaagttaattgcacgttttgctaatccggcgctgaaacataagacctggcaaatcgcaatggatggtagccagaaattaccgcaacgtatgctggcaggtattcgcatacatctggggtgcgaaacggactggtcgttgctggcattaggcgttgctggctggatgcgttacgtcagcggcgttgatgatgccggaaatgccattgatgttcgcgatccgcttagcgataaaattcgcgaacttgttgcgggcagcagcagtgaacaacgcgtaaccgccctgctttccctgcgtgaagttttcggtgatgatctgccagataacccgcattttgtgcaggccatcgaacaagcctggcaacaaatcgtacaattcggcgcacatcaggcgctattaaacaccctcaaaatttaacgatttctgcggttaaagcggatgaagctcaccttcgtccgctctccccttctcttttctgccttttttagccaggattaacgctcagttaacttaccagagtattgcggagccgttgtgaccaggaccaacctcatcaccggttttctcggcagcgggaaaaccacgtcgattcttcatctgttagcccataaagatcccaacgaaaaatgggcggtactggttaatgaatttggggaagtcggaattgatggtgctttgctcgccgatagcggcgcattgctgaaagagatccccggcggctgcatgtgctgcgttaatggtttacccatgcaggtagggttgaataccttactgcgtcagggaaaaccagaccgcttgttgatagagccgaccgggctgggccatccgaaacagatcctcgatctgttaaccgcaccagtctatgaaccgtggatagatctgcgcgccaccttgtgcattctcgatccgcgcttgctgctggacgaaaaaagcgccagcaatgaaaacttccgtgaccagctggctgccgcagacatcattgtcgccaataaatccgaccgtgcgacgcccgaaagtgagcaagcgctacagcgttggtggcagcaaaatggtggcgatcgacaattaattcacagtgagcatgggaaagttgacggtcatcttctggatttgccgcgtcgcaatttagccgagttgcccgccagcgccgcgcattctcatcagcatgtcgtgaaaaaagggttagcagcgttaagcctgccagagcatcaacgctggcgtcgcagtctgaacagcgggcaaggatatcaggcctgcggctggatattcgacgctgatacggtattcgacaccattggcattctggaatgggcgcgacttgcaccggtggaacgcgtcaaaggcgtgctgcgtattcccgaagggctggtacgaatcaaccgtcagggcgatgacctgcacattgaaacgcaaaacgttgcgccaccggacagtcgtattgagctgatttccagcagcgaagctgactggaatgctttgcagagcgcgctgttgaagcttcgtttagcgactaccgcgtaaggttgcctgcgtttttcagtaagataattagagaaaatatgattaaaaatttgccgcaaatagtgttgttgaatattgtcggcctcgcgctgtttctttcctggtatattcccgttaatcatggattctggttgccgattgatgcggatattttttatttctttaatcagaaactggtcgaaagtaaggcctttttgtggctggttgcattgaccaacaatcgcgccttcgacggttgttcactgctggcgatgggtatgttgatgctgagtttctggctgaaagaaaacgccccaggcagacgacgtatcgtgattattggtctggtcatgctattaactgcagtggtattaaaccagctgggtcaggcattaattcctgtaaaacgggccagcccaacattgacttttaccgacattaaccgcgtcagcgaactgctctctgttcccacgaaagatgcctcacgagatagctttcccggcgatcacggcatgatgctgcttattttttcggcattcatgtggcgttatttcggcaaagttgcaggtcttatcgcccttattatttttgtggtttttgcgtttcccagagtaatgattggcgcacactggtttactgacatcattgtcggttcgatgaccgtgatattgatcggtttgccctgggtgttgctgacgccattaagtgatcgattaatcaccttttttgacaaatcactaccgggaaaaaacaaacatttccaaaacaaataactcacagtaattaacatcatcaggtttatttttatagtgaggataatcctgatgatgcgcaccgtgctttcatctatcgaacgcaaaaatcattctctaagtaaatgaatggattgcatgcgtttcactcaatcgtactttaattgaccaatcccgcttattaactttctgtatcactttttcttataaaaaatcatgtaaaaccgctcgccaagaccgcaccaatcgggtaatctcgaactcgttttgcctcggcggtagattatcctcacagcatataattttgtgcgttagtccacagatttggccttaaggaattgtttcaacatgcccaggtaattagtctcgtgtcgcttggcatttttttataacgatatttgtcgttaaggacttcaagggaaaacaaacaacatggtcaaatctcaaccgattttgagatatatcttgcgcgggatccccgcgattgcagtagcggttctgctttctgcatgtagtgcaaataacaccgcaaagaatatgcatcctgagacacgtgtagtgggtagtgaaacatcatcactgcaagcttctcaggatgaatttgaaaacctggttcgtaatgtcgacgtaaaatcgcgaattatggatcagtatgctgactggaaaggcgtacgttatcgtctcggcggcagcactaaaaaaggtatcgattgttctggtttcgtacagcgtacattccgtgagcaatttggcttagaacttccacgttcgacttacgaacagcaggaaatgggtaaatctgtttcccgcagtaatttgcgtacgggtgatttagttctgttccgtgccggttcaacgggacgccatgtcggtatttatatcggcaacaatcagtttgtccatgcttccaccagcagtggtgttattatttccagcatgaatgaaccgtactggaagaagcgttacaacgaagcacgccgggttctcagccgcagctaataaaccgtttggatgcaatcccttggctatcctgacgagttaactgaaagcactgcttaggcagtgcttttttgttttcattcatcagagaaaatgatgtttccgcgtcttgatccaggctatagtccggtcattgttatcttttaaatgttgtcgtaatttcaggaaattaacggaatcatgttcatacgcgctcccaattctggacgtaagctcctgcttacctgcattgttgcaggcgtgatgattgcgatactggtgagttgccttcaatttttagtggcctggcataagcacgaagtcaaatacgacacactgattaccgacgtacaaaagtatctcgatacctattttgccgacctgaaatccactactgaccggcttcagccgctgaccttagatacctgccagcaggctaaccccgaactgaccgctcgcgcggcgtttagcatgaatgtccgtacgtttgtgctggtgaaagataaaaaaacattctgttcatctgcgaccggtgagatggacattccactcaatgaattgattccggcgctcgacattaataaaaatgtcgatatggcgatcttacccggcacgccgatggtgccgaacaaacccgcaatcgtcatctggtatcgcaaccctttgctgaaaaatagcggcgtctttgccgctctgaatctcaacctgacgccttcactcttttatagttcacggcaggaagattacgatggcgtcgccctcattattggcaatactgcgctatctaccttttcttcacgtttgatgaacgttaacgaattaaccgacatgccagtccgtgaaactaaaattgcgggcattcctctgaccgttcggctttatgcagatgactggacatggaacgatgtgtggtacgcatttttactgggcggcatgagtggaactgtcgttggcctgctctgctattacctgatgagcgtacgtatgcgccccggcagagaaatcatgaccgccatcaagcgcgaacaattttacgtggcgtatcaaccggtggtggatacacaagctttgcgagtaacgggcctggaagtactgctacgctggcggcatcctgtcgcgggagaaattccccctgatgccttcattaactttgccgaatcgcaaaagatgattgtgccgctgactcagcatctgtttgagttaattgcccgcgatgccgcagaattagaaaaagtgctgccggtaggcgtcaaatttggcattaacattgcgccggaccatctgcacagcgaaagctttaaagcagatatccagaaactgctcacttccctacccgcacaccatttccagattgtgctggaaattaccgagcgcgatatgctgaaagagcaagaagccacacaactcttcgcctggctgcactcggtaggcgtagaaattgctattgatgacttcggcaccgggcacagcgcgcttatctatcttgagcgttttacgctcgattatctgaaaattgaccgtgaatttatcaacgccatcggtacggaaacgatcacttcacccgtacttgacgcggtgctgacgctggcgaaacgcctcaatatgctgacggttgctgaaggggtcgaaacgccggaacaagcgcgatggctaagcgaacgcggcgttaatttcatgcaaggctactggattagtcgcccgttaccgctggacgattttgttcgctggctgaagaaaccgtatacgccgcagtggtaaggtgtgcttacgtcccttattattcatagtgaaagcatgccggattgcggctaatgatgagtaaaaggaaatccgttgcagatgattgtgcgcatactgctgctgtttatcgctctgttcacctttggtgcgcaggcgcaggctatcaaggaaagctatgcctttgccgtgctgggcgaaccccggtacgcgtttaatttcaaccattttgattatgtgaaccccgccgcgccaaaaggtgggcagataacgttgtcagccctcggtaccttcgataatttcaaccgctatgcactgcgcggcaacccgggcgcacgcaccgagcagctgtacgacacgctatttacgacttccgatgacgaaccaggcagttattacccgctgattgctgaaagcgcacgctatgctgacgattattcctgggtggaggtcgctattaatccgcgcgcccgttttcatgatggttctcccattactgcccgcgatgtagagtttacttttcaaaaatttatgaccgaaggcgtgccgcaatttcgtctggtctacaaaggcaccaccgtcaaagccattgcgccgttaaccgtgcgcattgagttagctaaacccggcaaagaagatatgttgagtctgttttcgctgccggtatttccagaaaagtactggaaggatcacaaacttagcgatccgctcgccacgcctccgcttgccagtggtccgtaccgaattacgtcctggaaaatggggcaaaatattgtctattcccgcgtgaaagattactgggcagcaaacttaccggtaaaccgtggacgctggaatttcgacaccattcgctacgattattacctcgatgataatgtcgcctttgaagcgtttaaagccggtgcctttgatttgcgtatggaaaacgacgctaaaaactgggccacgcgttataccggtaaaaatttcgataaaaaatacatcatcaaagatgagcaaaagaacgaatcagcccaggatacgcgctggctggcgtttaatatccaacgtccggtattcagcgatcgccgggtgcgggaagctatcactctcgcctttgactttgaatggatgaacaaggcgttgttttacaatgcctggagtcgcacgaacagttattttcagaataccgaatacgcggccagaaattaccccgacgccgcggagctggtgcttctggcaccaatgaaaaaagatctaccgtcagaagtcttcacacaaatctaccagccgccggtatctaaaggcgatggctacgatcgtgacaacctgttaaaagccgacaaacttctcaacgaagcgggctgggtgctgaagggtcagcaacgcgttaatgccacaacgggtcagccactcagctttgaattattgcttcccgcaagcagcaatagtcagtgggtattgccgttccagcacagcctgcaacggctgggtatcaacatggacattcgcaaggtggataactcgcaaatcactaaccgcatgcgcagtcgcgactatgacatgatgccgcgcctatggcgggcgatgccgtggcccagttccgatttacagatttcctggtcatcggaatatatcaattccacttataatgccccggcgtgcaaagcccggttatcgactcgctgatcaaccaaattattgccgcgcagggaaataaagaaaaattactgccgttggggcgagcattggatcgcgtattaacgtggaattattacatgctgccaatgtggtacatggcggaagaccgtctcgcctggtgggataaattctcccaacccactgtacgccctgtttacagcctgggtatcgatacctggtggtatgacgttaataaagcggccaaactgccgtcagccagacaacagggagagtagatgggcgcttacctgattcgccgtctgttgctggtgatcccaacattatgggcgattatcaccatcaactttttcatcgtgcaaattgcgcctggcggtccggtcgaccaggccatcgccgccattgagtttggtaatgccggagtattacccggcgcaggcggtgaaggtattcgcgccagccatgcgcaaacgggcgtcggcaatatcagcgacagtaattaccgtggcggacgcggattagatccagaagtgatcgccgagatcactcatcgctacggtttcgataagccgatccacgaacgttacttcaaaatgctctgggactacatccgctttgattttggtgatagcctttttcgcagcgcctcggtgctgacgctgattaaagacagtctgccggtttccatcaccctcggattgtggagcacgctgattatctatctggtgtcgattccgttaggcattcgcaaagctgtttataatgggagccgctttgacgtctggagtagcgcatttatcatcatcggctacgccattccggcctttttgtttgccatcctgctgattgtcttcttcgcgggcggcagctatttcgacctgttccctctacgcggcctggtttccgctaactttgattcgctgccgtggtatcagaaaatcaccgattatctgtggcatatcacgctgccggtgctggcgacagtgattggtggctttgcggcgctgaccatgctgaccaaaaactcattccttgatgaagtgcgcaagcaatacgtggtgaccgcgcgtgcgaaaggggtaagtgaaaaaaatattctctggaaacatgtgttccgcaacgccatgctgctggtgattgccggttttccggcgacgtttatcagcatgttttttaccggctcgctgctgattgaagtgatgttttcactcaatggccttggcttactgggctacgaagcgaccgtctcgcgcgattatcctgtaatgtttggtaccttgtatattttcaccctgattggcctgctgctgaatattgtcagtgatatcagctatacgctggtcgatccgcgtatagattttgagggacgttaatgtcgcgactcagccccgtcaatcaggcccgttgggcgcgttttcgccataaccgtcgcggctactggtcgttatggattttcctcgttttgtttggtttgagtttgtgttctgaacttatcgccaacgataaaccgttgctggtacgttatgacggcagttggtatttcccgttgttgaaaaactacagcgaaagcgattttggcggcccgctggcaagtcaggctgattatcaggacccgtggctgaaacaacggctggaaaataacggctgggtactgtgggcaccgattcgctttggtgctaccagtatcaactttgctaccgataagcccttcccttctccaccctcccggcaaaactggctgggaacggatgccaacggcggcgatgtgctggcacgcattctctatggcacgcggatctcggttctgtttggcctgatgctgactctctgttccagcgtgatgggcgtgctggcggggcgctacaaggctattacggcggtaaagtcgatctctggggacaacgctttattgaagtatggtcggggatgccgacgctgtttttgattattttactttccagcgtcgtacagcctaacttctggtggctgctggcaattactgtcttgtttggctggatgagtctggtcggcgtggtgcgggcggagtttttacgcacccgtaatttcgactacattcgtgcggcgcaggcgcttggcgtcagcgatcgcagtatcatcctgcgtcatatgttgcctaatgccatggtcgcgaccctcacctttttaccgtttattttatgtagttcgataaccaccctgacctcactcgatttcctcggcttcggtctgccgctcggttcaccgtcactcggtgaactgctgttacaagggaaaaataaccttcaggctccgtggcttgggatcaccgccttcttgtcggtggcgatattattgtctttgctgatctttattggtgaagccgtccgcgacgcatttgatcctaataaggcggtgtagcatgacgcaaactctgttagcgattgaagatttgtcggtgggttttcgccatcagcaaaccgtacgtacagtagtcaatgatgtttcactacagattgatgctggcgaaacgctggcgctggtgggtgagtcaggttcaggcaaaagcgttaccgcgctgtcaattttacgcctgctcccttccccgccggttgaatatctctccggcgatattcgttttcgtggcgaatcgctgcttcatgccagcgatcaaacgttgcgcggtgtacgcggtaataagatcgccatgatttttcaagagccgatggtgtcgttaaatccattgcataccctggaaaaacagctttatgaagtgctttcactccaccgcgggatgcgtcgggaagcggctcgaggcgaaattcttaactgccttgatcgcgttggtatccgccaggcggcaaaacggctgacagattatccgcatcagctctccggcggcgaacgccagcgggtgatgattgcgatggcgctgttaacgcgaccggaattattaattgccgatgaaccgaccaccgcactggacgtctctgtccaggcgcagattttacagctgttgcgcgaactgcaaggcgagctgaatatgggcatgctgtttattactcataacctcagcattgtcagaaaactggcccaccgcgtggcggtaatgcaaaacggtcgctgtgtcgagcaaaataacgccgctacgctatttgcctcacccactcatccttacacacaaaagctactcaacagtgaaccgtcaggcgacccggtgccgttgccagaacctgcctcaacgttgctggatgttgaacagcttcaggttgccttccccattcgcaaagggattttgaagcgcattgtggatcataatgtggtggtgaaaaacatcagttttacgctacgagcgggtgaaacactgggtttagtgggcgagtccggttccgggaaaagtacgacgggactggcgctgctgcgactgattaattctcagggcagcatcatctttgacggtcagccactgcaaaatttaaatcgccgccagctgttacctattcgtcatcgcattcaggtggtatttcaggatccaaactcctcgctcaacccacgactcaacgttttgcagattattgaggaaggcttacgggttcaccagccgacgctttctgccgcacaacgcgaacaacaagtgatagccgtgatgcatgaagtgggattagatcctgaaacacgccaccgttatccggcggagttctctggtggtcagcgacaacgtattgcgattgccagggcattaattcttaagccctcgctgatcatacttgatgaaccgacatcatcactcgacaaaacggtacaggcgcaaatattgacgctattgaaatcattgcaacaaaagcatcaactggcctatttgtttatcagccacgatttgcacgttgtccgcgcgttatgtcatcaggttatcgtactgcgacaaggggaagtagtggaacaaggaccgtgcgcgcgcgtgtttgccacaccgcagcaggagtatacgcgtcagctactggcgttgagctgacgcttaaaaaggattgtagtttgaaaagggttcggcaattgccacaccaaaatttttcaatcggcatgttgcagcaaactcgtcctggcgatttacaaacaggcacggctcaccttcacactccagcaccgaacatggaacttcgatgtcgcttaacgcctggcttagtttatacatcaccgaccatgcattatcaccatccgggctaagcaatttaagcgccaccaggctgttgtcaccgcacggtccattttgcggaatcggttcaaccttcgaacctgcgaaaccagcagaccagcgatagttctgcggtagacgatggacgattgagagttgtaatgaagtcacttattttccccggaagtacatttacttcacaatttgtttacatcaattttaacacatcatcaataatccgtctttatacagatcgtaaagattgatgcctcgcctgagtggcctctatggctctgatttaagtaatatctgcgggcgtggtcacgtttgcggggctatatgtacccgtttctgcgatctaactcaacctttttaactacaatgatgtgactttttacataaattgattttacataaaataaacatatatcgggggaatgatagatttgtggttgacatgcatcaacaaaggaagccttttagcttcctcgttgtgcaatagatcaccgttttttcggccgactggcgtacagacagaagagaatggagctggttgcgcagaatgcaattgaccaaatcatcggccatgcagagttaaaggtcgcaagagaaagcaatgcgccaacaattgcccctatgccaaaacggaaggttcctgccagcgaagatgccgttcccgccatatggggaaactcatcaagaatgaccgccatcgcattggatgacaccatcgacacgcagcccacaaacgccgcaacgccaaccaccagcgaccagaatcccagccccagcagcgcactgatgaccatccacgccgccataataaactgtatccacaaccccgagcggaacatatttaacgcgccaatgcggcggacgaagcggctgttaaaaatggtcatcacgaacaggaaaacaatgtttagtgcaaagtaataaccaaagttttccggcgcgacgtggttaatttcaatgtagacaaacggtccggcgcttaagaacgagaacatcccggcaaagctgaaaccactggcaagcatataactcaggacacgcttatgacggaacagcgccgcaaagttaccaatagtggtacgaatgtgaaaaggctggcgacgctccggtggtaaggtttctttaatcaggaagaaaatcattgccgaagccagaatcgccgctaatgccaggatccagaagatgtaatgccagctcagccacaccagcacccaaccgccgacaatcggtgccatcagcggtgcaatagtggtcaccagcatgacaaacgacatcatccgcgagaactcttctttcgggtaaatatcgcgcatcagggcgttaatgaccacgctggccgcagccgcagccagcccgtggaagaaacgcatcacaatcagctgatcgatggtgtttgccaacgcacacgccaccgcggcggcggcaaacaccagcgtaccgccgagcaccaccggcttacgcccgaagctgtctgccatcggcccgtagattaactgccccaacgcaaagcccagaatataagtactgagggtcatctgcgtactgcccgccggtacgccaaactgcgctgaaattaccggtagcgcgggcagatacatatcaatcgacagcggcatcaacatggccagcaggccaaggataaaaacaatagcaaacgacgaatgctgtcgggtggtcacaacgggctcctgaaagtcattgaaaagttagacgacgctggcaatttcttcttcagttaacggacgatattcaccgggggctaaatcagcatccagcgtaataccgccaatacgttcacgatgcagctcaaccacgtggttacccacggcggcgaacatgcgtttcacctgatgataacgcccttcgctgatggtcagacgaacctgcgttggggtaatcacttccagcaccgcaggcttagtgagatctttttcgttatgcagctgcacgcctttagcaaattgctctgccgtatcgtcagctacaggtgattccagtgtcaccagataggtcttctcgcaatgatggcgcggagaagtaatgcggtgcgaccactgaccatcatcagtcatcagcaccagaccggtggtatcaatatccaaccgccccgccgcatgcagtttccacgctaccggttcatcaagaaaatagagcaccgttgggtgatcagggtcgtccgtggagcaaacatagccctgaggcttattgagcatgaagtaacgtggaccgtgttgctgcgccagcgggttgccatcgtaagcgacatcatgttcaggaagcagtttgaacgctgcattacggacgatttcgccatcgacggtgacacgattgccgcggatttcacgcccggcaatagcacggctaacgccgagttgctgtgcgataaatttatcaagtcgcatgtgtgtgattttgcctgtaaaaacggaggtcgggcattgacccgaaaatctgaactgttgtctgcccagtatagcggtctaataacatccctcaagggaaaaagatccatggcatactattagcagaataatctacctacgcgagaccatgatttttacacttcgcccatatcagcaagaagccgtggatgccacgctcaaccattttcgtcgtcataaaacccctgccgttatcgtgctgcccaccggcgcaggtaaaagcctggtgattgccgaactggcacggctggcgcgtggtcgtgttctggtgctggcacacgtcaaagaactggtggcgcaaaaccatgcaaagtatcaggcgctggggctggaagccgatatttttgccgctgggttaaagcgcaaagagagccacggtaaagtggtatttggcagcgtgcagtcggtcgctcgtaatcttgatgcctttcagggtgaattttcgctgttgattgtcgatgaatgccaccgtattggtgacgatgaagagagccagtatcagcaaatcctcactcacctgactaaagtgaatccccacttacgcctgctggggctgactgccacgccttttcgattgggcaaaggctggatctaccagttccattatcacggcatggtacgcggcgatgagaaagcccttttccgtgactgcatttatgagctgccgctgcgttatatgattaaacacggctatctgacgccgccagaacgactggatatgccagtagtgcaatacgatttcagccgcttgcaggcacagagtaacgggctgttcagcgaagctgatctcaaccgtgagctgaaaaaacagcaacgcattacgccacatatcatcagccagatcatggagttcgccgaaaagcgcaaaggggtaatgattttcgccgccaccgttgaacacgcaaaagagattgtgggattactgcctgccgaagatgctgcactgattactggcgacacccccggcgctgagcgcgatgtgttaattgaagattttaaagcccagcgttttcgctatctggtcaacgtcgcagtactgaccaccggatttgacgccccgcacgtcgatcttatcgccattctgcgccctaccgaatcagtgagtctttaccaacaaattgtcgggcgcggtctgcgtctcgctccgggcaagactgattgtttaattcttgattatgcgggtaatcctcacgatctctacgcgccggaagttggtacaccgaaaggcaaaagtgacaacgttccggtacaggttttctgccctgcctgcggttttgccaacaccttttgggggaaaacgaccgccgacgggacattgattgaacactttggtcgccgctgtcagggatggtttgaagatgacgacggtcatcgcgaacagtgtgacttccgtttccgttttaaaaattgcccgcaatgtaacgcagaaaatgatattgccgctcgccgctgccgcgaatgtgacacggtactggttgatccggatgatatgttaaaagcggcgctacgactgaaagatgcgctggtattacgctgtagcggcatgtctttgcagcatgagcacgacgagaaaggcgaatggttgaaaatcacctattacgatgaagacggcgcggatgtgagtgagcgtttccgtctgcaaacgcccgcccagcgaactgccttcgagcagctttttatccgcccgcatacgcgcacaccgggcatccctctgcgctggatcaccgccgccgatatcctcgcccagcaagccttattgcgacacccggattttgtcgttgcccgcatgaaaggtcagtactggcaagtgcgtgaaaaagtgttcgattacgaaggtcgttttcgtcgggcgcacgaattacgcggttaatggtagttttgattgatgtataaagcgattgagtatagaatctcgcccgcttttgcatacgcaaagcagatcacttacctgttgctgggtcgcctgtagcaggattaatttaagagagaaagaaatgtttactatcaacgcagaagtacgtaaagagcagggtaagggtgcgagccgccgcctgcgtgccgctaacaagttcccggcaatcatctacggtggcaaagaagcgccgctggctatcgagctggatcacgacaaagtcatgaacatgcaagctaaagctgaattctacagcgaagttctgaccatcgttgttgacggtaaagaaatcaaagttaaagctcaggacgtacagcgtcacccgtacaaaccgaagctgcagcacatcgacttcgttcgcgcttaattgctgaataagttgtaaaaaaccccgctccggcggggttttttgtatctgcagattatgcctgattacggtattgctattttttgcaggccagataaggcgttcacgccgcatctggcattcagaacacaaaaccgattaattgccgccagacgtccggcgctgcaattggtcacgcaaattcggcggcgtgcctttaatggtcagggtatcggttgccggatcccagaagatgcgttcacctaacagcatcgcatcaaagttaatagtcaagccaccgccgctaccggcaaacttcgtcaactgacgcagtgtgctacggtctgccgggaagctctcttccagttcgtagcctttttcagccgcaaactccgtgaaactcacttcgctgacgcctgccagctctttcgacagcgactccagttcgatctcttcgcctgcctgcagctgctcattacagtagctataaacctgctggcgcacgttctgtcgctctgctttatccagttgtgcttcggcagtgaaatcatcaaccgcttgcaacagcccacggttttgcgctttcgcgtttaacccttcgctggccccgaggaaatccataaagaaatccgccactttgcgccctactcgccctttcaggaaagtgagatagcgggtggactctggattggtttcccattcggttaaatcgatacgcgcaacaatatccgcatgattgatatcaagataatgggttggattgatgtcgagattttcgttaacgcgcatactgctcaggttgctcagaactgccaccagcagatactccaccgccagataacggtagtggcaaaacagcacgaatccaccgtcagcaaaaggatatttcgctaattcgtcacgcaggcgcccggttgccgcgcggctaaatgccagaaagtcctcttcgccctgacgctgtaagcgcagcgtctgcgccagttcactctcttcgctaaacaagccgtaagctttatttttggcgctatagacccgatgcagttctgccaccatctcaacgacggtttctgtcggttccagcaatgaatcgcgcaacaccagctcaaggttctgctcatcacgcttgataagctggtgcagagcaatctggttgatatccagactcatgataaactctcctttaagaccgggcggtattcaaccaccgccggttaagcgacgcaataaaagatggcggtcattttacagaaggcagcgtaacgagaatgatttaacgcataaaaaagcagaaaaaaaaccgttgctacggtaatatgttgccctttcatcaactaactgatttcgatttatgccacaaatttcccgctacagtgatgaacaggttgaacaattgctcgcagagctgctcaacgtactggaaaaacataaggctccgaccgacctttccctgatggtgttaggcaacatggtcactaaccttatcaataccagcattgccccggcccaacgccaggcaattgccaactcttttgcccgcgccttacagtcctctatcaacgaagacaaagcgcactaagggaaacagataacaggttatggtaactcatcgtcagcgctaccgtgaaaaagtctcccagatggtcagttgggggcactggtttgcactgttcaatattctgctttcgctcgtcattggcagccgttacctgtttatcgccgactggccgacaacgcttgctggtcgcatttattcctacgtaagcattatcggccatttcagcttcctggtgttcgccacctacttgctgatcctcttcccgctgacctttatcgtcggctcccagaggctgatgaggtttttgtccgtcattctggcaacggcgggaatgacgctattactgatcgatagcgaagtctttactcgtttccatctccatcttaatcccatcgtctggcaactggttatcaacccagacgaaaatgagatggcgcgcgactggcagctgatgttcatcagcgtgccggttattttattgcttgaactggtgtttgcgacgtggagctggcaaaagctgcgcagcctgacgcgtcgtcggcgcttcgcgcgcccgctggccgcattcttatttatcgcctttatcgcctcgcatgtggtgtatatctgggccgatgccaacttctatcgcccgatcaccatgcagcgcgctaacctgccgctttcgtacccgatgacggcgcgacgttttcttgagaagcatggtctgcttgatgcgcaggagtatcaacgccgtcttattgagcaaggtaatccagacgccgtttccgttcagtatccgttaagcgaactgcgctatcgcgatatgggcaccgggcagaatgtgctgttgattactgtcgatggcctgaactactcacgcttcgagaagcagatgcctgcgctggcaggttttgctgagcaaaatatttcgttcacgcgccatatgagctccggcaacactacagacaacggcatctttggcctgttctatggcatctcgccgagctatatggacggcattctgtcgacccgtacccctgcggcgttaattactgcgcttaatcagcaaggctatcagctgggattattctcatcagatggctttaccagcccgctgtatcgccaggcattgttgtcagatttctcgatgccgagcgtacgcacccaatccgacgagcagaccgccacgcagtggatcaactggctgggccgctacgcacaagaagataaccgctggttctcgtgggtctctttcaatggcactaacattgacgacagcaatcagcaggcatttgcacggaaatatagccgggcggcaggcaatgtcgatgaccagatcaaccgcgtgctcaatgcactgcgtgattctggcaaactggacaatacggtggtgattatcactgccggtcggggtattccgctgagcgaagacgaagaaacctttgactggtcccacggtcatctgcaggtgccattagtgattcactggccaggcacgccggcgcagcgtattaatgctctgactgatcataccgatctgatgacgacgctgatgcaacgcctgctacatgtcagcacacctgccagcgaatattcgcaaggtcaggatttgttcaaccctcaacgccgtcattactgggttactgcagcggataacgatacgctggcaattaccaccccgaaaaagacgctggtgctgaacaataacggtaaataccgcacttacaacttacgtggtgaaagagtgaaagatgaaaaaccacagttaagtttgttattgcaagtgctgacagacgagaagcgttttatcgctaactgattaattataaatcagttagcaaaatatcttacttgcaatcggtgtggaaaacggtagtattagcagccacgagtcggcacgtagcgcagcctggtagcgcaccgtcatggggtgtcgggggtcggaggttcaaatcctctcgtgccgaccaaaaatcccaagaaaaaaccaacctttacggttggttttttatatctgcaattaattcgataaacagaccgtgacacatcacagcctgtttattttttgttatcagaacgtccagaccacacccgcctgagtattccacggcgattctacccctgcgccattgccatagctgactgacaaatgaccgcttaacgtcggggtaaacgatgaccttatcccagcctgataaacgccacgggttccagccacatcattattaaatttgccatcgtcattaactttcacctggttagaatcggcgtattcctgacgcacggcggctttcagtcagggttccagcgtcgtaccgttttgcaggtccatgtgatagcttaccgccgttcccgcttcagcgcgtaatatccgggtatttcccacatccgcgcgcatgccgtttgataacgtgtagtcctgaccatctgtggtaaagccggtaaaggccagatagggtctaacactccacaatccgtcaacccaacggaacccgctctcgacatgagcacccgcgccgttactattgtaatcgccaaacgctgttgccccattactcatcttgcaatggatggtgttggcaaaacggtcaactttcaccactccatcaacataggcaccgttctgatgctcccaaccggcataagcccccagggtatagctatcgacattgcctttgccgccgcgatcaaaaccaatatcagaatgagagtaaccaaagaacaagccgcgaattgtgctggtttcttcacgggagaaacggctatcgataccgagcgtcagcccggtcaatgtttgctcaaagccagcgcccgcatcagtggtcacgttgttgcgggtgttaattgccgaactccacatcgccgtatcgtaattaacgccttttacgctaccaagacgctcacgcacggtgtccagttctgcatcaaataccagcggttgtgctgccgccatattcagcacatcagtggttgaaggggtaatttgcgcgcgattctctgccaaactccagctatggttgccattatccagcaaggtatattcatacgtaccgatatcaacaacgcctccggcattgcccaacgtaaatgcagcatcaccgccgcccgttgttaccagtgtaaggctatctcctgctgccgggctggcaccggtgtccgtcacgaatattttgaaatcacctgttgcctgaccggtgacgttgagctgatcgctctgatgattagccatatcggtacgcatataaaaattgccgtttcccgacagggtattggtggtcaacgtaatgaaattttccgcacttgccgtcactgatgaacgagtcactggctcatccatcataatcacatttgcgtcagacatcgcaaggttggctaagttgaggagggtgttttggttcgtcgtagtgatatcggcaatgatggtccatacgctattttcgagcgaaacgtccgctttgctggtatccacggcaccatgcgttctaaaagaagcgccctcagaaaccactaccttacccaccaacattgcgggtgcataatttatttgcggcttcatgacctcaagaatgccatcattccctctgactgaaacgttaaccattgtgccagcccagacgttagcgcggccattgttgataaccatattttcagagatggcttttgaggaatacgtgatacttccattctgatctgatcgaccgagatcatataccgcatttgcctgcactttcgtaccagtatcctttcccagcgattgcatagtggcatgctcatcaaggatagtatcaatggcctgcgtgtcctccataacaatgagcccggaaccatcatccagttcataattttttgacacaccatcttttatactaaattggcctttactgtttgtaccactcacttccagcgcattcgttgagacaattaattttccgcctgcttttttatcaacgccagttgcagtcccgccatccataacctccagtaagccgccactatctacagtagtattataagcgaagtcattttcttcaactcgcaaacttccgccgttttccaacagcatattgttagcaataccattcttgatttcgaactgaccgagacggtttgttccgaatacctccatgacccgcgtgcttgctttaatagcaccgcctgctttctgatctaccgcaatcgctaatcccccctctttaacctccagtaatcctcccttttcgatagcggcaaggacggtaatcccatctttttcaacgattaagcgcccgcctttaatcgtgggatcattcgctgcgccataaacctgtagcacaccattattgagggtagtctggtttgccgcgccacccatttgaacaatttgataaccgtcatttaatactgagtattctgcggtaccattcatttcaatgtactgataccctccgttaatttcagtattactacttacaccaaattcttttatatgctgttctccgccaggattgattttcgtattattggcggtcccataaaccagctggatatctttttccaggacaacaccatcaacagtctcaccatactcaactgttgatgccaatgctatgggtgaatataacgctgtagccaccagaacagatattgcggaacgacaaagagaaacagaaccagattgatgaattgagctttcatcctatgaaattaattgctgttaaaagcattgggtacggaaaatacccatagctccatacccggagtcagtttttaaaaactgtttaaagaaatgcacaagtattgtgattgattttttagttgtttttcttgatgagaagctgatgcaaaattccgtctttataatgaaaatgatgccaaagcgaacgacaaggttgtagttttcactacatgtccatacataaaatggggtaacattcacgcgcctggtagcgttaccaacgctacgctcaaacataatgattctaataaaacctcaggagactactatgcctgaagcaacgccttttcaggtgatgattgtggatgatcatccacttatgcgacgcggtgttcgtcagttactggagcttgatcctggctttgaagtggtcgccgaagcgggcgacggcgcgagcgcgatcgatctggcgaatagactggatatcgacgtgatcttgctggatctcaatatgaaaggtatgagtggcctggatacctcaatgccttgcgcagggatggcgttaccgcgcaaattattatcctgaccgtatcagatgcctccagcgatgtctttgcactgatagacgcaggcgcagacggttatctgttgaaagacagcgacccggaagtattgctggaagcaattcgtgctggagcgaaaggcagcaaagtctttagcgaacgcgtcaatcagtacttacgtgaacgtgaaatgtttggcgcggaagaagatcccttcagcgtgctgacggagcgcgagctggatgttctgcacgagctggcacaggggctgtcaaataaacagattgcctcggtgttgaatatttcagagcagacagtaaaagtacatattcgcaatctgctgcgcaaactcaatgtccgctcacgcgtggcagccaccattctgttcctgcaacaacgcggggcacaataaaaatagcccgatggcatcaccatcgggcctctttttatttactctcctgcggcgacaaatgttgcatcgcctgcgcgatactacgttcaatcaccgcacggcgagtatcgttggcaggtaagagtttcaacatcatctcccacgcggcaacggcttcgccaaatcgctgctgctcaaaggcattaaacgcatacatgcttaacacacggatattgctgtggtcgcttctcaccaactggcgcagcagttcaccaccgaggcggttgtcgttgggatcagatgaacgtgtcaacgcttcagcataacccagtgcggcatcgctgtttttcggatcgaggcgatacgcagtagcgtatgcatcggtggcgatactagcgttacccagcgccatgccaacgcggcccaacataatccagccttctatatctcccggatttttttgcagttgagtacgcatccccagcgcaagacgcgacatctcttcttcgttgagcggatcggctttcggatccagcgccctgtccagcaacgccggagcctgtgccgtggcctgctgccagattttcacctgctgataattgccagtctggtagtagctgacgccagccacaattaacgccaccacaatacccggcagataaacaatatatccggcacgcttaccttcctgcacgctttgttcaggaaacgcttccggcactacgcgtacccgacgccgcgagcgggcgtatatgacccaaccgccaatgccaatagccactaccggaagtacccacagcagcacggtcagcggcgttaacggcggatcgtaagtgacgaagttgccgtaacgcgccaccatataatcgacaatctcttttttacttttaccttcctgcatcagttcatacactttctgacgcaggtcggtggcaatcatcgagttggaatcggcaatgctgttgttctggcatttcgggcagcgcagttcttcagtgagctgacggaactgttgttcctgtgcttcatctttaaactgcaacacgtcgatggtcgccagtgctgagccggagatcatcagcatcagcacgcccaataaaaacctcattgtgcggcctccttactgtatttctcccacagcggcttgatctcttcttcccagacgcgaggattgagatcgcccgcatggcgatagcgaatgataccgttgccgtcaataaggaaggtttctggcgcgccatagacaccgagatccagccctaacatgccgtcgccatcaaacaggcttagcgcgtaaggattgcccagctctttcagccagctgattgccttctggcgatcgtctttatagttcatgccgaccacgcgaatgccctgcgctgaaagctgattcagatattgatgttccgcacggcaggtcggacaccaggtcgcccagacgttaagcagcactggtttgccctgagtcagcacatccgcctgataaaactgccccggattgtccagtgattcgagacgaaacttcggcacaggcttgccaatgagcgccgattccagattggtcggatcatccccttcggcattacgcgccagctgccacagcagcgccgcggcaatcgccaggaagataatcaacggaattaacaatactttgcgcttcatacggcctccggcgcagttttttgcggactcacgcgcttacgatagcgaggatcaaacagacacagcagtccgcccaacgccatcatcagcccgcccgcccaaatccagcgaacaaatggtttgtagtaaagacgcacggcccacgcgccgttttccagctcttcaccgagcgcggcgtacaggtcacgcgtgatgccgccgtcaattgccgcttcggtcatcatcgacccggcagtgttgtaataacgtttttccgcatacagcaccgtttccggcttgccatcgcgcgttacgccgatagtcgccacaccgccacgccagttcgggccagtcacctctttgacatcacggaaggtgaagcgatattcatgaatatcgacgctatcgccggacttcatgcgcacatcacgctcaacgctatagttctggctaaaggcaataccaacaattgtcactgccagccccaggtgagccgccaccattccccaataactgaaggtggttttcgtgccacgtgaaatacgcagcgcagcttccgcaattgccagcacagcaatccagcaggccattgccaggccgagcaccgtcatcgccacaactttgctttcgaacagccacggcagcagcagcgacagcaccagcgttgagatgaaggcgataatcaataaattgcggattttacgtgggcgatcgcgcccccagcgcaccagaggaccgacaccaagcagcagcgcaaacggcaccatcagccaggtaaacatggtgttgaagaacggttcgccaatcgaaatactgcccagtcccagttgcttgtgcaccagcggcagcagcgtccccagtaataccaccagcatcgcggcgaccagcaaaacgttgttcgctaacagcagagattcccgcgaccacagcgcattgtttacgcgtgagcgaactttgtgtccacgcgcggcaaacagcagcagcgaaccaccaatcaccagtaccataaaggcgaggataaacataccgcgtgccggatcagaggcaaacgcgtgtaccgataccagcacgccggaacgcaccaggaaagtccccagcagacacaacgagaaggcactgattgccagcagtaatgtccacgctttgaagctggcgcgttgttcagtgaccgccagtgagtgcatcagcgcagtccccaccagccacggcataaacgaggcgttttctaccggatcccagaaccaccagccgccccagccgagttcgtaataggcccatgcggaaccgagcacaatgccgagcgtcaagaagatccacgccgccagcgtccacggacgagtaaaacgcgcataagtgctgtccagacgcccgctcaacaaagaagcaatggcaaaagcaaacgccaccgagaaccccacgtaccccatatagagcagaggcggatggaagatcagccccggatcctgtaacagcgggttaagatcgcgcccttcaatcgggaagttcggcaacgtgcgtgagaacgggttagaggtaaagagaatgaacagcaaaaagccgacgctgaccatccccattatcgccagtacgcgggccacaatatccagcggaatacgctgactaaaaatcgctaccgcaaaggtccagccgctcatcagcagcacccacagcaggagcgagccttcatgcgcgccccaggtagccgccacgcgataccacaccggaagctgggtattggagttgctggcaacataggtgacggtgaagtcgttgaccacgaaggcattgaccagtaccagaaatgcgccagccacagacataaacagcagccaggcaaacaagcgggaagacgccatcatgcgcgcatctccgcgcgctacgccccatagcggatacacggacagcagcagcgcaattcctagcgccagacacagcagcccgttaccaatttccggcatcatgatgctgggtccttataaacactcgccgggcgacggtgattggcttccatcgctttctcaacttctggcggcgtgtagttttcgtcgtgtttcgccagcacttcttttgcgaggatatgattgcctttttccagttcgccctgcaccacaacgccctgcccttcacggaacagatccggcaaaatgccttcgtaagagacatctactgaaccttcagcgtcgtaaatggtgaaagttacttttagcgaattgggatcgcgctgcacactccccggcatcaccatcccgccaacgcgcagacgctgaccgacttccggcatctgctgagtctcacgcttgccgtagagaatctcccccggcgtataaaagagatcgatattcgagcgcagcgcatatagcaccagaccgatagtcagcgccagccctgccaacacggcacaggcgatccacaagcggtttttacggcgaatattcatgcagcctcctgctgttgcgcagcacgtaaacgcgcctcacgcgcccgctgttgcgccacaccacgcagaattgcgcgatgctgcatcaccgagtgcacgaccaaaaccaccagcggaataacggtcatcaccaccgccagccagacaaaaaaggcgtaaccgcccattgcgaaaaattcattccaggaagcaaatgcaggggtcatttacggcctcttttcagtatcagttcactcacccacggacggcgtttttccatcagcaaaatcaaattacgcatccgcatcagcgtcagcgtggcagacagcagcaggaagccaaaaatcgaccagcgcagcggcgaacgcatcgccggatcgatactttgctgcattcgcgttgatccctgatgcagggtgttccaccactccacggagtaatgaataatcggcagattcaccacgccaatcagcaccaggatacctgccgcacggcccgccagacggcggtcgtcgaaggcgtgccacagggcgatcacacccacatacaaaaacagcagcaccagttcagaagtcagacgtgcatcccatacccaccaggtgccccacatcggttttccccatgcagagccggtaaccagggcaataaaggtaaacactgcaccaatgggggccatcgccgccaccgccaggttggccattttcatctgccagacaaggccaataaacgctgccactgccattgatgcataaatgcccatcgaccagatcgccgcaggcacatgcaggtagataatgcggtagctatttccctgctgataatcagccggagcaaagccgaatccccagatccagccgacggtaagcacgaccacactggcaattgccagccacggtataaaccagccacagatttgatacagccgtggtgggatcgccagttgatgcagtgttttccacatagtttcgataccagactcgaacaaaaatcagtaatccagcgttattgaatgctgattcgtaacgctgccgccgtcgcaaaaggacttaatgtcgcggtgcctgccagcaacgcgcctaaaattgccagatacccgtcaacgggcaaatgcatggaagccgcgtccatcgcggcggtggcaaagatgagtaatgggatagtcagcggtaacaccagtatgctgagcagcaccccaccgcgcttaagtcccactgtcagcgccacgcccggtgcaccgagaaagccaagcgtaggcgttcccagcagcagcgtcagcgccatcacttgccagccataaacatccattcccagtagcattgctaccaggggcgaaaggatgagtaacggcagaccggttaccatccagtgcgccatcaccttcgccagcacaacggcgggcaagggtaacggcaacaacatcaattgttcaagactgccgtcctgcaaatcgtcacggaacagtcgttccagcgccagcaaggatgaaagcagcgcagcaacccagataatgcccggtgcaatacgcgccagcagttgcggctccggaccgatactgagcggaaaaagggtaattacaatcaggaagaaccacagcgggttggcgatttcggcgctatggcgaaacgctacgcgcagctcaagacggaaaatgcgccagaacatcatgcggccctcgtttgcgtcagtgaaatgcggcgaattttactttcagcaacgttgagcggctggtgggtagtcagaatcacaatccccccctgctccgtatgctgcgccatacgctgggtcagacgatcgacgccgttaacgtcaatcgcggtaaaaggctcgtcgaggatccataacgtggcacgggtcagccacagacgcgctaaagcgacgcggcgttgttgcccggccgagagctgatttacaggaatatcttcgaatccggcaagcccggcctgcgccagggcttccagacattgtgcggtatcgccatcgcgatgataaaagtgcagattttctaacgccgtcagccgggttttgatccccggctgatggcctatccataacaggttttgatggtagctgtcgcgtacctgatgcaagggctgcccttgccagagaacctcgcctgcgtcagggcgagacaaccccgtcagcaaacggagaagcgttgtcttccccgcgccgttgctaccggtgatttgtacccactctcctgcgttcagcgtaaatgacaagccactaaataaggttcgttcatcccgctcacaaagtaactctctggcttcaagcatacccacgcaataaccctgttaaaaacctggctcgacttcacgcatatcgggcagcttgtgcgctatccctttatggcaatcaatacagatttgcccatctttcaccgcctggtcatgcatcttcgcggcaaccgatttctgggcggttgtatccatatactcgaagttgtgacagttacggcactcctgcgagttattgtccttcatgcgccgccactcattctgtgccatcgtcagacgatgagcttcaaatttctgcggcgtgtcaataacgccaaaaattttaccatacagctctttacttgctttgagcttgcgtatcatcttcggcacaaactcgtgcggaacgtgacaatccggacaggtcgcacggacgccgctacggttgttgtagtgcacggaatccatgtattcctgatacaccgtgttgcgcatttcgtggcagctaatgcagaactcttcggtattggctttttccatcccggtgttaaagccaccccagaagacgatgccgccaacaaaaccgatcaacagcagcgtccccagcgccagacggctgggggtacgccaccatttccacaggcgcttaatcagaccaggcttacggtcagaatttcccataataacctcttatttcccgtaaccttttgatggggtaaaggtattccccacgattggcgcggtatcggcctgcggtacgtgacattgcagacagaaataacgacgcggagccacttccgcgcccactttgccgtcgctgtccataaagtgagtaggactgatacgcggcgcgccagtggtgcgataactttcgacaccgtggcactgcaagcagcggttggtattggtcgttacctgataaccttcaacgctatgcgggatcattggcggctgattcacatagttcagcggcatccgttcctgctcttttggcatccgaatggccccttcctgtgtcccggatacttccggcgactggctaaaatcgacgccattagccgcccaaaccgcgccgcttaccaccagggccagcatcgccgtccattgacacagcgctttcttcaggtcatggcttttcatgatttcgctcccgaactccatcgtgtagttattgtaaatacatcctcagaacagacatccacgcagcgaccgcacgtcatgcaatcgcggctggtgacctgcaccgggctttgttcatccagcaccggggcacgtagcacatgcggttccgggcaaacatgaaaacaatccatacagcggttacatttctgccgatcggtggccgcaacggtaatcacacctttgctacccagcacgccatacagcgcgccaaccggacaaatgtgcccgcaccagccgtgttcaacgaccagtagatcaaataaaaacagcgcgagaataagcagcgcgccgctgccgaagcccattaccaggctgcgccccatcagagatacggggttgatccattcccagatgagcgtgccagttaaggccgatcccagcagaatgaccaccaacagcacgtagcgaatgtggcgagggatcgtcgcagactgattgaggtcaaagcgcctgcgtaaccagttcgctaagtcggtaatcgggttcagcgggcagacccagctgcaaaataatcgctttcccgccagggcgtagagcacggtgataatcaccgcaccggtcaacgccaccgtggcaggcagatgaccactggcaagactttgcagcgtcatcagcggatcggtcagcggaacggtgtcgaataacaggctactgctgtagttgccgtgcaagatccacacaccaaaccatggaccgctcaaaaacatccccagcacgaagaactgacaaaggcgacgtaacaccagccaacggtgactgcgccaccagccttttttctccagcgcctcgcgcccggcgtcacgtttacgatttgccattgttcccctccagccaaccgaagcggtaatggtgacctaactcccctttcgccagtgacagcggtaacaccttgattgccggttgttccagcacgcatactttttcgcacttaccacaaccggtacaggcgtcgctgtgaaccgtcggcagaaagcgggcgtgcttaccggtacgcgtgttgcgctccagctccagggtgatggcctcatcaattttcgggcattcgcgataacaaacatcgcagcgcagcccctgaaagttgagacagttttcctggtccaccagtaccgccagccccatccgcgcgtcgtcgatcgattcaatctcacgatccagcgcaccgcttgggcacactttggcgcacggaatgtcctcacacatttcgcaaggaatatcccgtgcgacaaaatatggcgtgcccgccgacagaccagaggccagcgtcgccagttttaaggtgtcgtaagtgcaagcctgaacacactgaccgcaacgcacacaggcactggcaaaggcgttctcgtttatggctccgggcgggtgcaaccgcacgccagatgcgcgtgcggtttgctgttgtaaccccagcgccacacccacggcagccagcccgcctgctgtgcgaacgacatcgcgcagaaagcggcggcgaccattttgaggtttcgctgaccgggacataatggcttacaccttctccagtttgactgcgcacttcttgaagtccgtctctttcgagagcggatcggtcgcatccagcgtcagtttgttaaccagctgtgcggcgtcgaagaacggcatgtacaccaggccctgtggcggacggttacgaccgcgcgtttcaacaatcgagatcacttcgccacggcgagaaaccactttcactttgtcgccacggcgcagatcgcgcgctttcgcatccagcgggtgaataaacaagaccgcttccgggaaggcgcggtgcagttccggcacacggcgagtcatactgccggtgtgccagtgctccagaacgcgtccggtagagagccacaggtcgtactcttcatccggtgcttccgccgccggttcgaacggcagtgcgaagatcaccgctttgccatccggtttaccgtagaacttatagccttcgcccgctttcacgtacgggtcgttaccttcgctgtaacgccactgtgtttctttaccgttcaccaccggccagcgcagaccgcgcgctttgtggtagtcatcgaacggcgcgagatcgtgaccgtgaccgcgaccaaaccatgcgtactcttcgaacagccctttttgcagatagaagcccagctcgcgggattcatcgttcagctgatcttccgccagttcggataccgggaatttgctcacttcgggggtggcatacagaacttcgtacagcgttttgccacgcagttccggtttcttcgccagcagctcttccggccatacttcttcagttttgaagcggcgggagaactggactaactgccagagatccgatttcgcttcgcctggcgcctgtacctgctgacgccagaactgagtacggcgttcggcgttaccgtaagcgccctctttctctacccacattgcggtcggcaggatcaagtcggcggccagcgcactgactgtcggatacggatcggagacgatgatgaagttgcgcggatcgcgccagcccggcatacgctcttcattgatgttcggcccggcctgcatgttgttggtacacatggtccagtaaacattcagcttgccgtctttcagcgcacggtcttgtgccaccgcgtgcagaccgatttttgccggaatggtgccgcccgggatattccacttcttctcgcagatatcacgatgtttctcgttagtcaccaccatgtccgcaggcagacggtgagcaaaggtgcccacttcacgcgcagtaccacacgcagaaggctgcccggtcagggagaacggaccgcaacccggctgggaaattttgccggtcagcaggtgcaggttgtagaccaggttgttggcccacacaccacgggtatgctggttgaagcccatcgtccagtaggagatgactttcttgttcggatcggcatacagctgcgccagttgttctaactggtctttcggcacgccggtcatttcagcggttttttccagcgtatactcagcaacgaaggctttgtaatcttcaaagctcatcggttcggaggcgtcagaacccggattcttcgctgctttttccagcggatgggtcggacgtaaaccgtagccgatgtccgtcgcccctttgcgcaggttaacgtgcttgctgaagaagtcctgatttatcgcattgttttgaatgatatagttggcgatgtagttcaggatcaccaggtcagattgcggcgtaaagatgatgccgttatccgccagctcgaagctacgatgctggtaggtagaaagcaccgccacggtgacgttctggttagagagacgacggttagtgatgcgtgaccagaggatcgggtgcatctccgccatgttagcgccccacagcacaaacgcgtcagcctgctcgatgtcgtcatagcagcccatcggctcatccataccaaaggtacgcataaagccaactactgccgacgccatacagtgacgtgcgttcgggtcgatgttgttcgaacggaagcccgctttgaacagcttggacgcggcataaccttcccagatagtccactgaccagaaccgaacataccgatcgattccggtcctttttctttcagggcggttttgaatttctcttccatcacatcgaaggcctgatcccaggtgattggggtaaattcgccttctttgtcatatttaccgtttttcatacgcagcagcggctgcgtcaaacggtctttaccgtacatgatcttgggcaggaaatagcccttaatgcagttcaggccacggttaaccggtgcgtccgggtcgccctgacaggccaccacacgcccctgctgcgttccgaccagaacgccgcaaccagtaccgcagaaacggcacggcgctttatcccatttaatggcttcctgctgaccaacaacggcgcgggcaacgcccggcacgctgagaccggcagccgccgcagcggccgcaacggcgttagctttcataaagctacgacgactgagtttcatggtgtttcctcaccttgctcttcctgctggtgataaaccagcgacaccgccagcacgccctctacgttgcgtactgactcaatggtttggatcagcgtttcgctgtcttctgcttccaccaccacaatcaactgaccgctcggcgcgtcgctgacagcaacttcacagccgggaaaggcgttcagttgggtgctgatgtctgaaattcgttcgcttttggcctgcacgaccaggctgcaaacttgccagttagtgtgcatggagatactccgcagttatggctgataccggacagctggctgcacatgctccacatccgttgcaaagttggctattaagttgcggctggtagattccggagagcgtcgggcgaaagataattgccattggctcacagctatcctgacagcggcggcattcaactgactgatacgccaggcacgcgtccccaatggtgaactgcaaatcccaggccctggtgtggcgcggagaaaatagcgattcggggcaagcctgcgcgcaggcgtaacagaagctgcactcgttatttttgaaattaacgctcggatagccgcccgcgccgcgttgcagaatgttgttttcacaagcattaatacaggcgtcgcaacgggtgcaatgggtcagaaaatgagattcatcaccggaccagggtggacggataccgttactggctttgcgccagcgaccagtgagtatgccccgacgggatgcatcaatcttcacattgaccttccatcattaacgcgctctgaaaattgagagcgaccaaataaaccgcataattaataagccatttttatagccgctaagatattaaaggatgtgtcaaagatgcataccccgatcggggtaaaacctgtagcaggatcaaaagagtggcgggaagcgtggcaaaaacgggcttttgctcacatttcaaatggttataaacatatttatatagcgattaattcaccagagatatttctgctggtttgctccctcatcagaatttaacactaaaagagcaggtaaaattgtctgaatgttctttaagttattcataaagcaaattaataaatctgatgaatatgttaaccttcagcgacatcatcggtgaaaacctataaatgaagaaggaaagcaaaaaaatgaagaccattctacctgcagtattgtttgccgctttcgctaccacttccgcctgggcggcagaaagcgtccagccactggaaaaaatcgcgccttatccacaagctgaaaaagggatgaagcgtcaggtgattcagttaaccccgcaagaagatgaatctaccctgaaagtagaactgttaatcggtcagacgctggaagtcgattgcaatttgcatcgtctcggcgggaagctggaaagcaaaacgctggaaggctggggctatgattattatgtctttgataaagttagctcgccggtttccacgatgatggcctgcccggatggcaagaaagagaagaaatttgtcaccgcgtatctgggcgatgctggaatgctgcgttacaacagcaagctgccgatcgtggtgtatacgccagacaatgtagatgtgaagtaccgcgtctggaaggcggaagagaaaattgacaacgcggtagttcgctaaaatgctgtgaagtgcggcaccccgtaggccgaataaggcggtcacgccgcatccgacatctaacgcccgagccggtgcctgatgcgacgctggcgcgtcttatcagcatacgccacatccggcataccatgccggatgtggcacatcattacaacgcaatatccgccacttctttttgaacgggttgcggtttcaactgcggttttggcgtactatctgctgcctgcggcttgtcgtatttcagccccagcacttcgctggtgtactgcaactcgcgttctgttgccgctacatcaccgttcagcttgcgtccataagacggaacgatcgctttcaacgtagcctgccattgcgggctggaaacgcgatcgccaaatactttttccagcagatccaacataatcggcgcggcggttgacgcccctggcgatgcccccagcagcgcggcaatggtcccttgctggtcactgaccacttcagtacccagacgcagtacgccacctttctcggcatcacgcttgataatctgcacgcgctgccccgcttgccacaaacgccagtcctctttttttgcctgcggatagtactctttcaacgcttcaaaacgatcctcttcactcaacatcacctgactcaccagatatttcaccagatcgaaattatccagcccgacgtgcatcatcggcatcacgttagaggtggtggtggaactcatcagatcccacaatgaaccgtttttgaggaatttggttgagaaggtggcaaatggcccaaacagcactacgcgtttaccgtccagaacgcgggtatcgatatgcggaaccgacatcggtggtgcgccaacggatgctttaccgtaaaccttcgccagatggtgattaaccacgtccgggttttccgaaacaaggaactgtccgcccaccgggaaaccggcgtagtctttcgcttccggaatccccgattcctgtaatagcttcagcgccgcaccgcccgcgccgataaagacaaatttggcgcggatgttctgtgcagtgccgtttttcagatcggcaacggtaacggtccaggtgttatcgtcattacgctttagggcgcggacttcgctgctgagttgcagcgagaagttagatttcttctgtaaggaagcaattaactggcgggtgatctcgccatagttcacatcagtgcccatttctgtgcgtgttgccgctactttctgttgtggatcgcgcccttccatcactaacggtgcccactctttgatctgcgcgtgatcttcagagtaacgcataccgcgaaacagcgagctttgttgcaacgcggcgtaacgggcgcgcaggaaattaacgttatcctcgccccagacaaagctcatatgcggaacggtattgataaatgaacgcggagtacgcagcacgccgcgctcaacctggtgcgcccagaactggcgggaaatctgaaatgcttcgttaatggcgactgctttttcaatactgatgctgccatcggcgttttgcggggtgtagttcagttccatcagtgcagaatgcccggttccggcgttattccagccgttcgaactctcctgcgcgacaccctccaggcgctccaccatggtcatcgaccattcaggctccagctcgcgtaaataggtccccaacgtggcgctcataatgccgccgccaatcaacagtacatcagtttcctgctcctcggacgctttcgcttttgccgccatcgaaacggcattaagccccacggccatcgagaagagcatggcagtcacttttttcatcttgttaatgccttacttttagtcgctttattgcaggtgagatttgcgcggcatcaacggtaacacttaagtaacaacatttaaataatgtttataaattatattctaattttagaaacattataatttcgttgattaattatagggttattagaaatgaagggatttttagcatattgacctgacggcagcagtccgccaggtcagcgtcgtaatattatgccgtccgggcaacggcatcacgcgaagcggcatcgcgctcttcgcccgtcagctcgctaagttgcccattgcgcatttccagcaggcggtcggcgtggataaagtaatgatcatcatgactgatagcgaaaatagttttacccatctcctgcatcagcggcagcaacacctgataaaactcacgacggaagtgtggatcctgatccgccgcccattcatccagcaggataatatcgcgttcttctgccagcgccagcaacagcgccacgcgttttttctgcccttttgataacttcaggttaacaatacgcccgttgcttaactcaagcttatgagccattttcagctgcgccagccacttctcaaccagttgcgggttagcgggtttaccctccggccccagcagttgatcaaacagccagacatcggtaaacactgccgaaaacagtttgcgataatcttccggttgttcgtcactgacaggtttgccatccagcaagatttcgccgctttgtggctggtacaagcccgtcagcaacatcgccagcgtcgattttccactaccgttgccaccaatcagaaacagcagctcgccacgtttaatggtgaggttaatcggcccaacggaaaacgcgttatcctgatagctaaacgtcacgttacgcagctccagcgtttgccagttgggaaaagcctgcgggcgcggaaactcagctttgaaaggcgcgagcgcgaatttgttcagcttgttaaacgccacctgcgccgtcagcagcgtcggcaatgcgccaaccgccgaaagcagcggcgtacgcaggaataacagcgtcaacgaataggtcgcagcaacgttggtatcagcccaaccgagactgttcgccatccagaacaccaggccgatagcgcccagcatcatgatgtttgaccagttcacggcgctaagatggaaggtgtctgcgcgaataatatgatggcgatactcttgcgcatcggggatgtagaggttgttaaacacatactcggcgcgttcccggttcagagtcagctctttgcgcccttcgagtacggtttgaaaatccgtgtacagcttgtcttcggtttcacgcagggtcgccatatgtttgtacacccgcgccaccagtacaaaaccaccccagatggtgatcgccatccagatagccgttaccagcaacattttgcccgacagcatccacagatacgccgcggaaccgatagtgagaatgctcccctgcaccagttccggaagacgcacaaaagcaatggtgatattgcgcacatcgctggttaatcccgccagcaacgaggcgctaccgagttgttcaatgcgctcgacgtgggtatccagaatccgcttgataaattcactacgcagtcggtaaacgaagtgatgccccaaagtggtgagcgccagttgcgatccgagagtgactgccatcaacagcagtaataatccaagaaactccggcaacaccagcagactggtatccgccgtttcgataaggcgctgattgataaaagcaattaagccaatgcctaatgccgcactggcgaggcttagcgccatcacactgataaatggccagcgatactgccgccagacaagtacaagaagttccatgcagaaaacccggacaatgaattacagcccgcagtttaaacatcttcgcgcgcacagcaataataattcttatttttattcttttttacctgcctgacggaatgtcaggttgtagcggcagtcggtggtgagtggatgaaaccccgctttcaacggttgaataccgtgataaaacagccgcgattcaccgccccataccaccacatcgccatgttccaacaacaaacgtttgagcggatcattacgtttcaggccaccaaattgaaaaattgcgggtaagcccagagaaacagaaacaattggcgcgcgcagatccggttcgtctttatcctgatgcagcgacagtttcgcgccaggagcgtagcggttgataagacaagcatctggctggaaatctggatagcccgccgccgtagccgcacgttgacataaattatgaaaactctgtggcatggcgggccacggtttatttgtttgcggatcaatgggcgaatagagataaccttgccgatggctcgtccagcccagatgcccacagttggtcatcgccaccgacatggtatatcccccgggggtgaccatctggcgaaacggcgactggctggcaacgttattaatatcgcggatcagttgctccgcagcgttaaaagcaaaacggtgcaaaattaccgctccagccgccagtggctcttgccacggttcagcatcggcaaacagatccaacattacctctcctcattttcagcttcgcggcgcagcagttgcgctttacgcgacacgccccagcggtaaccggaaagtgtgccatcaccacggaccacccgatgacagggtattatgatagccagcttgttggcggcacaggcgctggcaacggcccgtaccgctttcggtttgccgatggcgttagccagttgctgataactgacggtttcaccgcaaggtatcgtgcgcagtgcctgccagacttgttgctgaaaagcagtgccgcgaatgtccagcggtaacgtcagcggcgtatcgcgttgattgaggctggcgatcacttcacgcacatgttgctgaaacatcagatcggcaggcgcgttgtcggcagcgggaaacatctgctgcaactcgctgattagtgtcgcgtcatcatcgcccagcaatatcgcgcaaatcccccgctcgctttctgccaccaggcaacgacccagctcacaatcagccagcgcgtaacgcaccgccagattttcgccaccgtgacggaattgtttagccgtcatgcccagcgtttcgtcagctttgcgatagtaactgctgctgtcggggaatccggcgttaagaatagacgtcgtcacgctctcccctttcgccagcgattcgcgcaaacggcgagcgcgccaggcctgttgccaggctttaggcgtcattccggtagtcgctttaaacaaccgatgtagatgaaatggactcatcgccacctggtcggctaaggcttccagcgttacaggcgtttcctgttccagcagtcgacacgcgtgggtgattttatccaaccgatgttgctgggcattggctttttctggctgacaacgtttgcaggggtgaaagccagcggcgagtgcctcgctggcatttgcgtagaaggagacgttttcccgcaaagcatgtctggcgcggcaagacggacggcaaaagatgcctgtggtacgcacggcgaaaacgaattcgccgtcggcattcgggtcgcgggctaagacagattgccagcgttgatcgtcagttaagcatgtggctttttcataatcagctccctggttaaggatagcctttagtctgcccggtcaccatcacgcaaaaaccaacaatcttgcgctttaatttttttcgctgacaaggaagcttttaaactgtggtgacatccaggttttaaagctatcgccttctttggtgatcatataaaccgccagcccttcccggcgaacaacctctttggctttcttcggcccgagtaccatcaagccagtatcccaggcatcggcttccagcgccgtcggagcaatcaccgtcacggataccagattgtgttcgatgggacgcccggtttgcggatcgataacatgggaaagacgtttgccgtccagttcgtaatagttacggtagctgccagaggtgctaatcccatgaccgttgatatccaccacagcctgaaccgcgttttctttatcggttggtttttgaatcgctacccgccacggctggccttcaccgttcataccacggctgttcagcgcgccgcccaccgacaccagatagcgggaaatcccttcctgctccatcaagcgtgccaggtgatccgccgcataaccttcaccgacggtggagagatcgacatataaatccggcaggtctttttgcagatattgctgatgcgactgattgatgaccgtcaggtgctgtaagccggttttggctttcatcgcatcgatctgttcctggctcggaatttgaaccggctgttgttccgggccaaagccccacagattcaccagcggcccgacggttatatccatcgcaccatcggtccttgcgccaatgcgcagcgaggtggtgacgatatcggccatcgcttcacttaccggccacggcgacaaactttgcgagtcgttaaagcgcatcagcgcggaatcttttttataggtcgaaagcagctgatcgtcggcatccagctgggtctgaatcttttctttaagttcggcactgcgtttggcgtcaatgcccgggatgctggcacgccagaaggtacccatggttttgccttcaagaacggtaacttcagtagcgtgggttttggcgggttgtggtttttgatcgcaaccaacaaagaagagcgcggcagccagcagtgccacgcgggtaaagcttatttccatacgtgattatcctcatgcgaacggtcgcaagagtacaccaaaaaactgtgtttgtacgctgaaaacaatgaaaaaagggcccgcaggccctttgttcgagatcaatcgagattagaactggtaaaccaggccaagagctacgatgttatcagtgttgatgccagcgtcacgagtgaactggttgtcgtccagcaggttgattttgtagtcaacgtaggtggacatgtttttgttgaagtagtaggtcgcaccaacatcaacatatttcaggatatcttcgtcgtcgtagttacgagtaccgatggtgcccaggtttttacctttagactgcaggtatgctacagacgggcgcagaccgaagtcgaactggtactgagcaacagcttcgaagttctgtgctttgttcgcccaacccagggaacctacgcgagttgcgttgtaggtctgggtgtactgagcagccaggtagatgttgttagcatcgtatttcagaccaccagtgtaggtttcagcacggtcgccgttaccgatgtaagcagcggtgttctgagcatcagtacgtttggagctggaaactgcagcaccgataccgaagccttcgtaatcataagtgatagaaccgccaacgccgtcgccgttctgacgcagagcatcgcgaccattgttggtcatgccttcgcctctagcgctaccgtttttgccctggtactgaacagcaaagttcaggccgtcaaccagaccgaagaagtcagtgttacggtaggtcgcaaagccgttaccacgctgctgcatgaagttgtcagaaccgtaggtgtcaccaccgaattctggcagtacgtcggtccaggaagttacgtcgtaaacaacgccgtagttacgaccgtagtcgaaagaacctacatcctggaatttcagacctgcgaatgccacacgggtccaggagttgttttcgttttcagcgctgttgccctggatctgatattcccactggccgtaaccggtcagctggtcagtaacctgagtttcacctttgaagccaagacgcatgtaggtctggtcgccatctacatctttgttgtcagagaaatagtgcaggccgtctactttaccgtacagatctaatttgttgccgtctttgttgtaaacttcagcagcgtttgctgcgcctgctaccagcagagctgggaccaggagggacagtactttaactttcatgttattaaccctctgttatatgcctttatttgcttttttatgccactgcatactgattaaccctcattaatcagtcggcaagtccattctccccaaaaatgcagaataatccaacacgaatatgatactaaaacttttaagatgtttcatttgtcgctatagatgtttcaaaatgtaaatagaagggaactttttaagattattgcggaatggtgaaataagcacctaacatcaagcaataataattcaaggttaaaatcaataacttattcttaagtatttgacagcactgaatgtcaaaacaaaaccttcactcgcaactagaataactcccgctatcatcattaactttatttattaccgtcattcatttctgaatgtctgtttacccctatttcaaccggatgcctcgcatccggttttttttacccttctttacacacttttcattattctgtgctaccacagaaaaactataacgcttgttaactatttcacaaataattaacatcagcataatttccagcaatcttcgtttatttgcaattaatttcgttgggctttttgtaggttatttgtacagcaaaatggcgcttgtacatctattttccccaatgcaggatgataaatatcacgggagaatagagaatcatcaatcaggtaagagtctggaatttcacacagtaccctttatactgccctatcacttcgcgaagttttaacaggtcataaacacgaatgcgtcagaaagagacaacggccacgacccgcttttcactcctaccggggagcattacccgcttctttttactgttgatcattgtgttactggtgacgatgggtgtaatggtacaaagcgccgttaacgcctggctgaaagataaaagttaccagattgtcgacattacccacgctatccaaaagcgcgtcgatacctggcgttacgtgacctggcagatctacgacaacattgccgcgacgacctccccctcctccggcgaaggtttacaagagacgcgcctgaaacaggatgtctactatctggaaaaaccgcgccgcaaaacggaagcgttaatctttggctctcacgacaactcaacgcttgagatgactcaacggatgtccacctatctggacacattgtggggcgcagaaaatgtaccgtggtcgatgtattacctgaatggtcaggataacagtctggtgctgatctcaaccctgcccctcaaagatctcacctccggatttaaagaatcgaccgtcagtgacattgttgattcacgtcgtgcagaaatgttgcaacaggccaacgccctcgatgaacgcgaaagtttttctaacatgcgccgcctggcctggcagaacggtcattactttaccttgcgtaccacgttcaaccagccgggacatctggcaacggtcgtggcttttgatctgccgattaatgatttgatcccaccgggtatgccgctggacagtttccgccttgagccagacgcgacggcaacgggaaacaatgataatgagaaagaagggacggatagcgtcagtatccactttaacagtacgaagattgaaatctcctcggcactcaactctaccgatatgcgcctggtctggcaggttccttatggcaccttattgctggatacgttgcaaaacattctgctgccactgctgctgaacatcggtttgctggcgctggcgttatttggctataccacattccgccatttctccagccgcagtacagaaagtctacccagcacggcggtcaataacgaattgcgcattttacgggcaattaatgaagagatagtctcactgctgccgctcggcctgctggttcacgatcaggaatcgaaccgcactgtcataagtaacaaaattgccgatcatttgctgccgcatttgaatctgcaaaacatcaccaccatggcggaacagcatcaggggattattcaggcgacgatcaataacgagctgtatgagatccgcatgttccgcagccaggtcgcgccgcgcacacaaattttcattattcgcgatcaggatcgcgaagtgctggtaaacaagaaactcaagcaggcgcagcgtctgtatgagaaaaaccagcagggccggatgacctttatgaaaaacattggcgatgcgctgaaagaacctgcacagtccctggcggagagcgcggctaaactcaacgccccggaaagcaaacaactggcgaatcaggcagatgtgctggtgcggctggtcgatgaaatacagttagcgaacatgcttgcggatgatagctggaaaagtgagacggtgctgttctccgtgcaggatttaattgatgaagttgtgccttcagtgttgcctgccatcaagcgtaaaggtctgcaactgctgattaacaatcatctgaaagcacacgatatgcgccgcggcgatcgcgatgccttacgacgtattttgctgctactgatgcaatatgccgtgacctcaacgcaattgggaaaaatcacccttgaggttgatcaggatgagtcctccgaagaccgcctgacgttccgcattctggacacgggagaaggcgtaagtattcatgaaatggataatttgcacttcccgtttatcaaccagacccaaaacgatcgctatggcaaggcggacccgctggcattctggctgagcgatcaactggcacgtaaactgggcggtcatttaaacatcaaaacgcgggatgggcttggtacacgctactctgtgcatatcaaaatgctcgcagctgacccggaagttgaagaggaagaagagcgtttactggatgatgtctgcgtaatggtggatgttacttcggcagaaattcggaatattgtcactcgccagttagaaaattggggtgcaacctgtatcacacccgatgaaagattaattagtcaagattatgatatctttttaacggataatccgtctaatcttactgcctctggcttgcttttaagcgatgatgagtctggcgtacgggaaattgggcctggtcaattgtgcgtcaacttcaatatgagcaacgctatgcaggaagcggtcttacaattaattgaagtgcaactggcgcaggaagaggtgacagaatcgcctctgggcggagatgaaaatgcgcaactccatgccagcggctattatgcgctctttgtagacacagtaccggatgatgttaagaggctgtatactgaagcagcaaccagtgactttgctgcgttagcccaaacggctcatcgtcttaaaggcgtatttgccatgctaaatctggtacccggcaagcagttatgtgaaacgctggaacatctgattcgtgagaaggatgttccaggaatagaaaaatacatcagcgacattgacagttatgtcaagagcttgctgtagcaaggtagcctattacatgaacaatatgaacgtaattattgccgatgaccatccgatagtcttgttcggtattcgcaaatcacttgagcaaattgagtgggtgaatgttgtcggcgaatttgaagactctacagcactgatcaacaacctgccgaaactggatgcgcatgtgttgattaccgatctctccatgcctggcgataagtacggcgatggcattaccttaatcaagtacatcaagcgccatttcccaagcctgtcgatcattgttctgaccatgaacaacaacccggcgattcttagtgcggtattggatctggatatcgaagggatcgtgctgaaacaaggtgcaccgaccgatctgccgaaagctctcgccgcgctgcagaaagggaagaaatttaccccggaaagcgtttctcgcctgttggaaaaaatcagtgctggtggttacggtgacaagcgtctctcgccaaaagagagtgaagttctgcgcctgtttgcggaaggcttcctggtgaccgagatcgctaaaaagctgaaccgcagtattaaaaccatcagtagccagaagaaatctgcgatgatgaagctgggtgtcgagaacgatatcgccctgctgaattatctctcttctgtgaccttaagtccggcagataaagactaatcatctgtaggccagataagacgcgttagtgtcttatctggcatttgcaccgattgccggatgcagcgtaaacgccttatccggcctacgattcccattatttcaacagattacattaaagtaggccagataagacgcgtcagcgtcgcatctggcatttgcactgaatgccagatgcggcataaacaccttatccgtcctacgattcccgcgatttcctgaccctctcggcatataccgtcagcgtctgttttatcacatccagcgttaccggcttcgacaggcagctgtccataccggactccagacaccgctgcttctcttcagccaacgcattagcagttactccgattaccggcaacgtcagtcccaactgacgaatgcgttgcgtcaagcggtaaccatccatatttggcatgttgacgtcgctaagcacgatatcaatatgattcttgctaagtacattaagcgcatcgacaccatcattcgcggttttacattgatagcccaacgatcccaactgatctgccagcagacgtcggttaatcggatgatcatccacgaccagaatcatcatatcgtcattatcgctgaccgctttgtccgtcgacggcagagcgttagcaggatcgtcgctctccatctcgatcaaataaatacgcgccaacaatgccggtagctcatgcggggcagccacactgtgtacccactcccctggcgctttctccagcggaataccaatatggcgacgacagaaggtcactaccgctctaccctgccatttttactcactacctcgtcagtaattaacacatcttcgggagtcggttcctgcccttcgtatgttgtaacgacgatgccgctgcgctgcaaactggtttccaggaactgacagagcgacgcattgcggaccgccagccagcagcgtttaccactcaacccttccacgccttttttctgcgggtactgagcgccgtacaacggaatacgcacggtaaactggctgcccattcccggttctgaatctaccgagatatcgccgtccatcatgctgatcagtttttcacaaatcgccagacccagaccggtcccctggaagtttcgctgtacgcccgttccgacctggaagaagggatcaaacaagcgcaccacttctttcgccggaatccccacgccggtatcgcgaacacggatagagagataatcgccatcagcgcggacatgcaaaactatacagccggtatcggtgaattttatggcgttactcaacaggttggagatgacctgctgtaaacgcatcgggtcgccatttaaggccactggcacatccggttcaataaagcagtacaagcctaactgcttgcgtaccaccagcggtaaatagttggcggtgatgtggttcatcacttcacgcggtgaaaactcacgcggttcgatcttcaactgttccgattcaatcttcgagaaatcgagaatatcgctgataattttcaacaacaggctggaagagttgttcattgccgtcaccagccgatcgacgcctttcggtaactctttggtttgcaacagatccaggttaccgataatgccatacagcggcgttcgcagctcatgactgacggtggcaaggaacatcgattttgactggctcgcctgttccgctgcttgtgccatctcctgcaacgactcttccatcttcacgcgcgaagaaacatccaccagcacacaaatggccacgttttcattacgatagcgcgaatggacgaagctgatttgcagattggtattgttgctggtcaggacatcaacaaaattgacctgctgcccacagataatttgcgtcagtcgttggcggtcctcatgcgtaagcatattgagataggtatgcgccagttcgttacttaaaatattgacgccatcagcggtacgcaaaatgcagatacccactggcgcggaggcgacaatcttgcgattgaactgctcatgttcttccagtcgcagggcgtcgctttccgccggaatgaaaatacgtcgctcgtacatccgcgcgagagtaaacaatgcagctccggcaagcacattcagcaaaattgcgttaaggatcaacatgcgaatgcgttccagcaccttatcaaccggcaccgaatacacgatgcttagcgatgagggtggcagatttttcttcagcaccagctcccggaacccttccgtatagccaaaccaggagcgttcctgcatccagcgaggatcgcccttaattttactttctggtccggtaagcgaaatcagggtatgaccattttcatcaagaatggtaacccccatcggcaacgtacccggtaagaaaaagttctccatccggatggtctgctcgacacccaaaagcgcctgcaaccggttcgccagataaactggcgtcaacgcgtaaaaatacccgacgccagggcgcggaccttcgctgatccagtagaggttactgccgctatcatcttgtggtgcatttcgatatttattgatgcgttcatgcaaagctttcaacgcggtatcgcgttccactggcatatcacgcagaccgaaattggccatgcagaggttatcactgccgattaaaaatacccggttgagatcgtaagccgcagaaaaattatcgcgccagtagcgcataaaccacgccaatgactccagagaacctcgccaggtgttactcattgcggaacaatcggagtcggcaaacagcggttcaaacgcaggcacatccgcctgcgtttctcgtccacgcggggaaagcacaccgttttctgccgataagcgattttcggcgatgtacttcagctctttcatcacatcagaggtgcgttgaataaagcgctgagcctgatcggaactcagattaaattcctgacgaatttccgattctcgctgatgtaacgcattaacgatgtaaaaaacggatgaaaaagcaatcaacagccagagcactaacgccaatgctctgaacatgtagcgcgaggctttcagggttgtacgaaaagaagcaaggtatttcaaaggggcgaagctccgcctcaggtgaccgatggagtgtggttaaggtagcggtaaaagcgtgttaccgcaatgttctgtcaccattgcaataatgcgtatcgcttagaaaccattgccttaaccaggaaagccggagtagatggacagttctcagtacgaaaaataagaaatgaccaatctgccgacgcttgttaatggttatatcctggcgtcggcagatcgcccagcagtcttatctgaaaaaagagagagccaggttgtgtgaagggatggatcaccagtcaaaacttttcaccagcgtcagctcgccagcattacgcatcggtacaataaatgtttcctgtttctcattgaccgatccttcatcggtgatcagcgtcagttgggcggtcgtcaattccgtttcgctgcgcccaccatagtagttgatatacacctgatagcgcccgtgaactggtgctggcatggcgaaaatctcgggtccgtaccccgtcgtgacatccatatccagtgcaccactgtttttcagcacggtgttaccgtaccaggcgtgttcgccatcgggcgtgacaacatggagatcgagatcggtattgtccgtatcccacgagagaaccagccgtaaacgtgcacgaatcgttcctgtacccggcgttgagtaaaactgcattttttgtcggctttgcccatccgggctgatgacctgcacgctgttgctgccttcagtgaaaatataagggcgtgcaaatgaaccatcggattcaactctctgcggcatactggcaccgttgaccaccagccggccctgctgaactttacccgccgcagcataattctttattttgccgcggatctgcgctgagatattttgatcatctgccatgttgacggacgacgccgggtaattgatcgattgtgaaaaactggcatcttcgccctctgccggatgccagccagagagcggtgcgtcaatctcgacttcctgcacaccttcactgtgagcgacaggcgaaagtgccaccagtaacaacggaagaaaaatctttcgcatagcattagtccattaataattgtcgggtcagcgtttcgatatagttctcatcaagcccggtgggataaccatcaaaggccaggtgcagatactcatgggttaaatccagccgatcctgaagcgtaaagaagttacgaataaacagccgtttctgctgccgatcggtataggggaaacctgagactaaacgacagaccgcaaacacgtctggttcgttgtaccccgtctcgccttgtaatatacgccgccactgcggcatttttttcgccagccaggctttcgctttgggtaataactggcaggttgagcgtggagctccccagcggctaaggctgttgtcgggataagcaaacgcgagtatctggtcgtaacgctccccctgccccgcctgggccgtggcttgccgccaggaaagtgtcccttcggtagcgcgactgccatgataatgaaccggatcgcctgcatagatgagatcctgcgtccaggcggtcatcgttcgcgcccccgtggtcgctggcgaagcagaaacacgctgcgtggcgctgctgtcggggatggtcaggcaatcgccttcccgattggcgttttgctgtaaaaaagtgcgaatcgccacggtcatggctttcgctgcctcagggggcgtacttttcgcctcgcgatccagaactctggcaacgtactcttcacgatcgagatgcgactgcaatttcagtttgcccttttcgctcagtaaggtcgtctcaccgtggctgacaaacgtaatgtggttaccattggtaaacgtcacacgatagcgcccattaagtacgccgggttttactgccgtcgtactcttttccgctgtgattttcttcagcggatagcgggcaaacagctccacctctacacattgcccactggcaacctgcgtcggcactggcaaaacccgattaagcaccgtcgcataacgggttagtaccgttttgctggtgccactgccagtagcccacagcggtgtaccatcggttaaccagccggcaaaaccaccctgacggatttcctgtttatcatcggcaaaccagctccaggttttcacccgtacccgactaccgagcatggatgcgactccgattttcgcctcgtccagcaccacatccagtaagacttcctgagctttgttttgcgcaggtaacgtcgctaatgaatcaagcagcgatttaaccgttaccgaggtttctggcttcagcgtagtaagagacgctaaccacgcaggtgcctgacgctgttgccagtattgcccccacacatctgcgccaatatgcaaccgctgcggcgcaaaatagagcccacaggaacgtaccagcgcggtatcgcgcgttatgctctccccagcctgacaacaataaacctcttccggggagtttccgcgacactggtagggctgctccggttgatgggtatcctccagccaggcgtaaacatacagtttccacaaactccctaacggcgtggtgagcgagtcaggtaatgtcgaggctttggtcacgcctgatgacgacagctgatacagttgatcgtgctgcgcaccgcgcagcaccagttgtaacggcgtctcctccgcaagcgttggcagagtaaccaacgccaatagccagacgattctgcgccagttcacttatttcacctgcatcccggtccattcactccctgccgcaacactttgctgcgcaggtgcataggaacgcacataacgagcaggaggcagaacgaattgcccttttgcgagaagcgcagcaaatggcggaaagtgaccgttcccgtcagttctttcaccggcaccatataggccagttcgcccatttcattacgcgctttttccagcaattgcccctgctgtttcgcggcgttgggtttattgactgaaatgcccatgttgtgcgctcaacgtcggctcccggcgggagcggtacttccacctgaccatagcgcagaactgcatcctgctcgctggtaagcgtaatttcatcgagatacagcgcatcgctgtcaatctcattgctggtcaccggttgcagaataaagctcatctcttcttcaccagggataagccgatacaactggcgttcaacggtcaccggaatgttactttgttgagccatttttgccggctcacgccagcggacctgcacattttgcggcgataattcgtcaccaaaagagagaatgtccggcacgccctgaccaacccaacgccagtcttcgccccctccagttaacttatgtttagcccatgcgcccgcaggcgcaggcaaaacaactggaggcatcgtcgccatatatttcgccagccagttcatggccagcgcgcgctcaatagtggattgctcagcggtcaaaccacttaaaatagcagccgcctgggtagcgtcgccaccgctattaagcagcacaaccgtgtgcgccagcggctgattgctgtttgccgctttatcccacgcatattgctgaacctgtggcatcaccgtggacttcaactgcgcttttttcagcaacgtcatggttaagacgtttgccaccgcatctgccagtggagattccggtgtatcgaggatcaggctgtcattgatatcgcgggtgtcttcctcagagaaatcttcatctttagttccgcgccgggcgatagcttcatccaaccctttcaacaacgttttgcacggcagattcatctcctgtgcccacgccagcaccagcgcccgatgcaataacggcatgttatctgcctgctcggcataactgtcgagcatatgctgccagtattccggttgttgcgttacgccgagcgcctggctggcctgccagtcggcgtaccatgcccatgccgtaaggaaggcgtcaccattgccatcttcaccccaccaggtaaagcgcgctccgggccccgccagttgcatcagccgcagacggttatcctgaatcatctgacgaatgtcgttagcggcggcactttgatgatcggcaagcgaacgccaggcgagactgagcgggatcagacggctaccggtgttgatcaccccaccccacggttcatcgactaacgcatcaagattgttgcggaaaatctcctgcggcgtttcactactttgtagccggatattgctcgcctgctcgggcaacatcagcgcgttctcgccaccgccgagcatgacatttttctgctgttcaacgggccagctgttgtccacaaaagacagttttgtgctaatgctgtcctgcacttgcccattttgttgcagttctgcacttaacaagccagattgctgaatattctgcgtcagcgaaatataattcgcccctttgtgcagcgtcagcgtctggcgcatctcagcgcctgcaaatttcgtcaccagcgccaccggttcgttatcctgctgactgaagataaacagtcctgctgccggtttgtcgcctatgcgatacaccgttggcatactccacttcatgtagagatttttttccgaacgcagataagcacgcccctgcccgaccagcccgtcgccgttcatcccacgcgcggtgatacgccagcgggttaacgaatcaggcatcaggaacgtgaaatacgctttgccttgtttatcggttgtgagtgacggcatccatgccgcggtatccacctcttcacgccgtggacgttcaagcatttttactcgccgctcgctgcggttagtcgcgccaggcgcaaccggctcgctggagagcgcctggtcgtagctgataaacgacagactggagctggtacgcacattgttacgccccagcggatagaaaaatttgccgatattcggcgcgatttctggttgcagcgcgtagatcatttcatcgaccacgcctaccgttagctgcgcagaaacaggtttacctttcagcgacgaggttaattcgacattgaccagttcaccaggctggtaatgggttttgtccgttttcacccggatatcaagctgaggaacggcaactttgatcccggcgttctgaaaactgtactgaccattacgggtatacagcaccgaaaaagtgatgttaggcgcaaaggaattgctcactggaacccgggcttcatactgggtatcgtttaaacgttgtaacgtcagccagtttgccggatgcgaaagcagcgactgctgttccacgcgatcgcgttccagcgtcaataatgcttcatcaattggctccggaaaagtaatcagcatcttcgcggtttcgcctggctggtacagcgttttatccgccacgatatctaccgtaccagtatgcgccgtgctgcccttaccgctgacggcatgacttaacccagcgagaattaagccgtctttatcgcgtaatgtcagattgtagttgccaggtttagcgaaattgacggtaaaggatttgccgcctgacggtagctctccgctatggctcgtgtggtcttcgagacgcaaccattcatacgtaacaggaacctgttttgaagattccagcgcggcataacggaacacaaccgactcgccgctattactgtattgtgcggcagtacttaatgagtaatgcgccagaccgcgttcaatgaggatctctttggtggtggtgacacgatacgccgcgccgtcactggcggagacggttaacaaataacggctcggtttatcggcggcggggagatttaacgccacatgaccgctggcgtcggacaccgtttcgctgccttccagcgacacggggaaacgtccggcataacgcaaatcgttaccgaccattgataattgctgagcgcgcaaacttaactgcacgcgggcattttttaccggctcgccatccgggtagagcagttgcagtttgccgctgaccgcttcgccagttttgaactcttttttgtcgagagctaaaccaatctcgaaatgtggcttgatgtagtttgccacgcgaaaactgctgctatagacctgattacggtaagcaagacgtaactcataacctccggcaacggcattttctggcaggcggaaacttccctgcccgccattgcgcgcatccagcgtgacatcgacggtttgcaacagactgccgttggcgtccagcaccgaaagcttcgccggggcgctgacgatgggggatgaatgcaacggatcgtggaactcgcgccccatcactttaacatcgacacgatcgcctgcgcgatatagcgggcgatcagtaaaaatatacaagcgggtggtgtagatttcactttcgtagaagaagttctcggagacaaaaacgccgccttcagcatccttacccagaatgtatgaacgttctggcgatatatgttgtaactgcaaggtaccgctgtcatcggtcacaccgcgggtcatcacgccaagaccgtcagtccacaagatctctgagccgggcttcgcttcaccctgttttttacccgcggtccacaccagaagctcgttgcctgacactttgctaagcgccacggtatcggaaacaaacaccaccgtcgtcgcccgatacccaccaaccatcgcctcgacgaggtacagtcccggctcttgttggccgagaggaatataaatgttacccggctgcggcgagatgaaattgctggatgcgccttccagttttaccccttgctgcggctcgaccggtttagcctgccatagtggataacggaactgttccaccaagggatattttttcagcggggaaaactggttgttctgtacataacgggaaggtttaataatggcattgccgagatgtaattcgggtaatgcctgagtcacattctgccgtgactgagaagagaaagtacgctgcattacgcggcgagatttgccgtaccagttatcccacagccaggtcagcgtattgttcagcccgtcgcccagatattgcggttgcaccacaatgcgatgcaggtttttctgctggcgcaaaaatgccatcgggtcaggaatacgatacaggcgaacgtccacgccgccgtactcttccatctgatagcgccgataatcacgccccggcgcttccagtcgcactttcgcctcttcactgctgctaaaactgctgtcagcaagcaaaaagaatgttcccccggcgggcggcgcatagttactggaaggaagcgaatcatcagcattagcaagccctgttcccacaagagacagggacaagcacgctgctatcgcgccagaaaatttaaacgataaatgccaatgaaattgggattggaatcgttgggtatccatcgggtgtccttccatgtcataagtcgttgcagactgactgcgcgcattccgttgtcagttttcgtggcgcttccggtgtggtagatgacgtaacgccccatccagaccattaagtgctgggcatcgccctgatcgaaaaaaatcatatcgccaggcagcgcctggtttatgtcctggccaataaactggctgttgtactgaatcaaattaatcgcggtcacgtaggggccggttttcccgttcccctgattccagttttgcgccagttgacgctgtccaggtgttagcgtcatctctggcggcaaatactggctagagaaaccgttactttttagccatttactatcgtgaactttcagcgtctcgttcgccgcaaatcgcaccaggcccgcacaatcctgctgataccagcgtggacttggcccctggcggagctgttcttgtgcaatgcgtacaaaccaggcgcgaaacagcccggattgttcgacattcagcatttcgctatgggcaacaacacaacacagccagcaaatcagcgccagcagcccgtgcctcatagcggctgccaggttatgggtagccactgccaggcggcaccgggttccatctgggccagcttcatgacataacgcggttgttgagataaagcgtccagcttcggcattaataaagtttgtgcggcgttataaaaaaccggttcgagattcttcggcagactggtcaacgtttcgttacgcagcagtttcgccacgccttgtggattgatatagagcggaacgatgccatcagtgggtattacatccaccattgccgggcggtttttattcagtgtttgcagggcgttattaaccagcgtgtcatcgagggagaaaagcagcgttttgttttgcatcgccagcgacacgcggaaaaaataatccgacattaattgatcgggttgcgccgcctgcgctttcggatactgaccgtatcgggaactcacttcgcgacgccagatttgcgcttcgccctgctgagtctggcttatcggcaaaacaccttctggcgctttgctttcgtgcgcaccaatattttgcgtaaacagtttccctggcaattgcgcctgttcggcagtgccatcaaactgaccgacaaacagcggggtttgcaattttgagtcttcataccagcacagccccgcggcaccgtctaacgccccattcagcttgtcgttttcctggctgatgtgcgaaagcatctcttcggcaataccgtgtgaatacggcaccaccacacagaagctggccccggcaggcatactgttccagaccggcgtaaaatcgaaactggtatctacgctggcggattcatcatttaacgccacaaaactgtgccagccgtcgttacccatttcgaagcgtacgccagcaaaagaaggcattaaccgctggtagccaaaacccagcaacctggcgctgaccacgatgcgctggcgtactggcgttttttcagcagcacgctcttccaggccaaagcttgcttgccagcgttttttgccgctcaacaaatcacctgcgatcgccgtggcttcggtatcctgctgatcatctttaaacagcatatccgtgctggaaaacactagcatcttgtcctgatatgtcgcgaacatcagagcgttattgccgttatagcgcaactgataaacaggaacagtttcactatttatcttgatgctactgatttccgttttgcttaactggctgtcgctggtagcggcaaacaacaatggctccagcagtttgcttaaaccactgcgctggatcagcaccatataatgtgaaagatggccttgtttatcgtgccacagcgctgcctgcgcgggctgatctaagagtgacgaaaagagcttatctttcagcgtgagatcgtgttcatagacaatacgacgaatgctgccttcaatgcccagacgatcggcatgattctgataatagaaaacgaaatcttcgctcagaacatcgtggagaaacggaatggtgaggagatctttgggaagctggctcagagagtcgctgtcgagaaagaggtccggctcattgagatcgatttgcagattgttgtgcaccaccagcggcgacaacgttttttctggcccactgccagcatattgcaacgcccagacgccagcggaaagcagtgctattgcgccaaaacctacaagaccatagaaccgccagcctttcgcctttttttcaccactcattgccacattccttgtgtatagccagccattttttacgggcacagccaaactttaccgtgccctaatacgacaaaagcccagactttgcagcctggacttttcaattcaaacaagggagatagctcccttttggcatgaagaagtaaaattattcttcttctggctcgtcgtcaacgtccacttccggagcgatttcatcgtccccttccgcggcactgccatcgatggtatccagatcttcctcgtcaaccggttcagcaacacgttgcagacccactacgttttcatcttccgcagtacggatgaggatcacgccctgggtgttacggcctacgatgctgatttccgaaacgcgagtacgtaccagcgtaccggcatcggtgatcatcatgatctggtcgcagtcatctacctgtaccgcgccaaccactaaaccattacgttcagtaaccttaatggagataacccctttcgtcgcacgcgacttggttgggtattccgccactgcggtacgtttaccgtaaccgttttgcgttgcggtgaggattgcgccatcgccacgaggcacgatcagagagacgactttatcgccttcacctaagcgaataccgcgaacaccggtggtgttgcagcccatcgcacggacagaagactctttaaagcgcaccactttaccttcagcggagaacagcattacttcgtcttcgccgctggtcaggtcaacgccgatcagctcatcgccgtcaaccagtttgatcgccactttaccggcggtacgcagacggttgaactcggtgaggacagttttcttcacggtaccgttagcggtcgccatgaagactttcacgccttcttcaaactcggtcactggcaggatcgcagtgatacgttcgtcctgctccagcggcagcaggttgacgatcggacgaccgcgcgcgccacgagtggcttccggcaactgataaactttcatcgaatagacgcgaccacggctggagaagcacagaatatggtcgtgagtgttcgccaccagcagtcggtcgataaagtcttcttctttaatacgtgcggcagatttacctttcccgccacgacgctgcgcttcgtattcagaaagcggctgatacttaacgtagccctggtgagagagcgtcactaccacatcttcctgagtgatcagatcttccaggttaatgtctgcgctgttggcggtgatttcagtacgacgtttgtcaccgaactgttcacgaaccagctccagctcttcacggatcacttccatcaaacgatcggcgctaccaagaatacgcaacagttccgcgatctgatccagcagctctttgtattcgtcgagcagtttttcgtgctcaaggccggtcagtttctgcaaacgcagatccagaatcgcctgagcttgctgttcggtcaggtagtacagaccatcacgcacgccgaactctggctccagccattccggacgcgcagcatcgtcgccagcacgttcgagcatcgcggcaacgttgcccagctgccacggattagcaaccagcgcagttttcgcttctgcaggcgtcggcgcatgacggatcagttcgatgatcgggtcgatgttcgccagcgccacggctaatgcttcaaggatatgagcacgatcgcgagctttacgcagttcgaaaatagtacgacgggtcaccacttcacggcggtgacgaacaaacgccgcgatgatgtctttcaagttcatgatcttcggctgaccatggtgcaatgccaccatgttgataccgaaagaaacctgcaactgggtctgggagtagaggttgttgagcacaacttcaccgaccgcatcgcgtttcacttcaatcacgatgcgcataccgtctttgtcagactcgtcacgcagcgcgctgatgccttccacgcgtttttcttttaccagttccgcaatcttctcgatcaggcgcgctttgtttacctgatacggaatttcgtggacgataatggtttcacgaccggttttggcgtcaacttccacttctgcgcgagcgcggatatacaccttgccgcgaccggtacggtaagcttcttcaataccgcgacgaccgttaatgattgccgccgtcgggaagtccggccccgggatgtgttccatcagcccttcaatgctgatgtcttcatcatcgatatacgccagacaaccgttgatgacttccgtcaggttgtgcggcgggatgttggttgccatacctacggcgataccggaagaaccgttcaccagcaggttaggaattttggttggcatgacgtcgggaattttttccgtgccgtcatagttatcaacgaaatcgaccgtctctttttcgagatcggccatcagttcatgggcaattttcgccagacggatttccgtataacgcattgccgccgcagagtcgccgtcgatggaaccgaagttaccctgaccgtctaccagcatgtaacgcagcgagaatggctgcgccatacggacgatcgtgtcataaaccgccgcgtcaccatggggatggtatttaccgattacgtcaccaacgacacgggcagattttttataggctttgttccagtcattgcctagtacgttcatggcgtaaagtacgcgacggtgtaccggcttcaggccatctcggacatctggcagcgcacggccaacaatgaccgacatcgcataatccagataggagctcttcagctcttcctcaatgttgaccggtgtaatttctctcgcaaggtcgctcatctaaccgctatccctctactgtatcccggattcaaaggtcgcaaattataacacagccgcgcagtttgaggtaaacctatacgctttattcacatccaatgcctgatatactcgtttgtcttgccaattacggagtagaagtgccaatgaatgccgaaaaatcgccggaaaaccataacgtagaccacgaagagatcgctaaatttgaagccgtcgcctcccgctggtgggatcttgaaggtgagttcaaaccgttgcaccgcattaacccgctgcgtctgggctatattgccgagcgtgctggcggtttatttggcaaaaaggtgctcgatgtcggttgtggcggcggcattctggccgagagtatggcgcgcgaaggcgcgacggtgaccggtctggatatgggctttgagccattgcaggtggcaaaactgcacgcgctggaaagcggcattcaggtggattatgtgcaggaaaccgtggaagagcacgcggcaaaacatgccgggcagtatgatgtggtgacctgcatggagatgctggagcacgtccccgatccgcagtcagtggtcagagcctgtgcgcaactggtgaaaccaggcggcgatgtctttttctcgacgcttaaccgcaacggcaagtcatggctgatggcggtggttggcgcggaatatattttgcgcatggtgcccaaaggcacgcatgatgtgaagaagtttattaaaccggcagaactgcttggctgggtagatcagacaagccttaaagagcgacatataaccgggctacattacaacccgctcactaatacttttaaactcggccccggcgtggatgtgaactatatgctgcacacgcagaataagtgaggttgttgtttggccgagccaatgcctgatgcgacgcttgccgcgtcttatcaggcctacaaatgctccccgtaggccggataaggcgtttacgccgcatccggcaaccgtgccgactagacagtgattaccatttcaccgtcatcgacaaaaaccctgccatctgggcaaaatcatcactccctttctgccacgccacgctgccgcgcagggacactcgctgactgatattgcccgtgactcccacttttatttcaccccgttgcttcaccgcatcgtcactgatagtgctgccatcctcttcaatttccgtcgaatggggatcgtgataataattcagatctaatgttggtatgacatgaacagcggtacgccattcgctgtgtaaacccagccgcatctgaatatcatcaccctgcgattgtgacacgcgcgcacggttagcggcggtaaaatcatcctgctgcacgccctgataaatcacctgcgcctgcggttcaatcaccacaccacgccccggtaaccactgatacccggcttccagcgaggcgataatccccgacgagtggtaatgatctgtgccatcgtcttgttcggaaacatcattgttaaaccacgcgtattgcagccagctatccagccaggccccctgcttctgattaccgtgctgataccagcttgaggtcagcccaacggcataaccgtggttctggttatcggcgcgagttccggtcatattcgagcggctctcgccctgattatcactgtagccaccaaccgccccaagcatccactcgccatcatcgccccagcgcccgctaaacaggtcaccgctaagctgcaccgtagaagtgtcttcatgctgagccagttgccctgccgccgtgtaatgataacgtccgccgataacacgtaaattcagcgtctgaccattgccacctgcatgatcgcgtcgctccatcataaacgcctgatttgccgcccgcagattattgagataaccgccaactttggcattcagcaccggctggtaagcggggattggatcgggtgttgggtcaggatcgggtgttgggtcagggtctggatcaggtggcaatggtggcgttacttcttgcgatcgcagataccagtcgttgttatcttccaccagcgtgtagtcatatgctcccatattgacgtagccgctgcctgccagactgaacttcgcattgttttgaaactgcgtgggatcggctgcgaaatcaaccactttaatgcctgtcgatgtcggctcaccaatccctgtaatggagttaaccaccacagttgtgttgccagcagtattaccgttcaacaccaattgatcgcttaccgagtcatcgccgtttaattcgctatcgagcagtagcgtaccgccgccggtataatcaccgtttaccgtcagcgtatcgccagcgacgccattttgcaggctaaccgcaccggacgtattggtcagattgccattaaccgtcacgtcggaaagataggtcaggctgtcagtttcaaggttggtattaagctcacctgtcaacgtcacgccatcggtggcattcaccagcgtcccatcgccgttaaacaatgaggcattaagggcgacggaagtatcctgcccggtcagacgcaaaaccgtaccatcgctgatatcgatagtgccgctggaagtagcatcgatagactgaatatcctgatccgcgccagtaacgaacgtcgccccatcaccgacccacagtgacgaagcataaggaaagatatccgcaacatcgcctttcagggtgccttcttcgacacgtactgccgactgcgttgtaccgctggcggtcagctccagcgtacccgcccccgttttagtaaatgtgctaccctcatcctgatgctgcccgctgctgtcagccatcagtgcgccccactgcgtgtctacccccgcatcaactgccacttcaccgtcggcgcgcatttcaatatcacgcccatgctcagtcgtcgtagagcgagtatcgacattggcagtaatctccatcacgctttcttgttgcttatcggtaaagataacctggcggttatagtgggtatctccaagctgcgagttgtcgctcaccatcagcgtaccggaggcgatttgtgttgtgcccaaataactattattgtttgccagacttacctgcccgtcgctcgcatcgaccaccacgtagacgccatctttcccgtcgccgccgatatgcaaattgtcgccacctgcaagatctaccacatcctgactgccgataaccgttccgctgctgccactgacttcaaggccatcattgtatgatgtgccgctctgccaggtggagaaatcagagagatcgagcacaccgccgtttaacacgatcgactgcggatcgtcctggagagcggcgagatctgccgcgtcgccttccagcgaaagcaccgcaccatcatcaacgactatatcgccggttagcgccatcgactgcgccccgacagcacgtagctgccgttttgcgcaatggtgagctgaccagcaccttcgatggtgccagcaaaactgccttgattaacagtaacattgccaccagcatcgatatttaaagtgccattctgaaagcccgtcaatgagtgcacaaaggtttgttgggtggagccaacgtttagctctgcctgattctggtacttatcaatactccctatcgtcagaccgtagcagtcttgcggatcgtcctggcaatgcgtatcgccgacattcatcagggagttgctgcggcccagggtaacttcaccgttttcaatctgcatctcaccagtaaagtcattgttatctgcattaagtaccagatcgccggaacctgttttggtgatcaacccggtaccagcaatagagtcaacagctccgtcattctctgtattgccaataaccagcgtttttccgtcggcaatatcaaaggtaacttcacttaagccgagatacataaagccacccgccgcagtggaaggaccatctccatagcctgctgcgctgttgttctcatccactaacacgccgccgttctggctgtagctgtcatcaacagaaatatcaataagatagggagccgtcgcgctattggtatatatcgccccgccataaccttcggcagtgttatttgtaaaggcagtgttatttattatcgtataacctgaaggatgcttgctgacgctattattatcggtaacatcgattgccccgccatcgccatcactgtaacttgttgatgtatatgcctggttgttatcaaaaataacatcacttaaatagacgtcattattaatggtataaattgcgccacctttgccatcattagcgatattattgcgaaacatggcgttagtgacacgtaaatcgacggcaccagtatcattagtaccagaagaatagattgcgccaccatagccgcctgcgacgttaccagaaaaaataacatcagtaagattcagcgttgagttttctttagcaaatatggccccgccgttattatattctcctgtaacggtgttattggcaaacagagtcattccagtttcattttctggtaatagtgaaaattccgctccttgttgcaaaaatacggctcctccgctggcgttattggtcatatccgaaaaaaccagccattgcccatcggcgacactccagtcctgcgtaatgcctgaaaggctttgcctgctggcgtgacaactcgctttgatatcatatccctggcataaatcaatggccgccgcgaaaccgttagcagagaaaagagatgcaatcattgacgggagtagagataaatactccttgcgtagaaagataatccgcatattcatctaaccattattttatataagacggcatatttaaacgcattatacaatatgggttatctttcttttgtaaattgtccaacccgatgcaatggctattatgttattatttgatgaatagtatcagtgcgtcataattcaagttaataaccttaagggataccagttatatttaaactaaattaaagtaatgaataattttcttataatataaggtaaattaacaaaatggcttcgcatttaacaataaccgaatagaaaacaaccatttcgacatcaacaatcgcttacattcgtttatatattgaccacaactgatacatcagattatgtgatgactcgtgcttagatcaatttttgcaatcattagcaaaaagattaataaaccatctatatcaatttatccaacctattctgccgttcaagaaatcgccgaacagttatttttaacaaatttttctcttcccattgactttcccggacaccttgtctgacctaaggtgcgcgaaagccactttttccttcctgagttatccacaaagttatgcacttgcaagagggccattttcacactatcttgcagtgaatcccaaacataccccctatatatagtgttctaagcagcttcccttactacaggtagtctgcatgaaactattgcggaaagaattccaaaaacaggtacgacatacatgaatcagaatctgctggtgacaaagcgcgacggtagcacagagcgcatcaatctcgacaaaatccatcgcgttctggattgggcggcagaaggactgcataacgtttcgatttcccaggtcgagctgcgctcccacattcagttttatgacggtatcaagacctctgacatccacgaaaccattatcaaggcggccgcagacctgatctcccgtgatgcgccggattatcagtatctcgccgcgcgcctggcgatcttccacctgcgtaaaaaagcctacggccagtttgagccgcctgcgctgtacgaccacgtggtgaaaatggtcgagatgggcaaatacgataatcatctgctggaagactacacggaagaagagttcaagcagatggacacgtttatcgatcacgaccgtgatatgaccttctcttatgctgccgttaagcagctggaaggcaaatatctggtacagaaccgcgtgaccggcgaaatctacgaaagcgcccagttcctttatattctggttgccgcgtgcctgttctcgaactacccgcgtgaaacgcgcctgcaatatgtgaagcgtttttacgacgcggtttccacatttaaaatttcgctgccgacgccaatcatgtccggcgtgcgtaccccgactcgtcagttcagctcctgcgtactgatcgagtgcggtgacagtctggattccatcaacgctacctccagcgcgattgtgaaatacgtttcccagcgtgccgggatcggcatcaacgccgggcgtattcgtgcgctgggtagcccgattcgcggtggtgaagcgttccataccggctgtattccgttctacaaacatttccagacagcggtgaaatcctgctctcagggcggcgtgcgcggcggtgcggcaacgctgttctacccgatgtggcatctggaagtggaaagcctgctggtgttgaaaaacaaccgtggtgtggaaggcaaccgcgtgcgccatatggactacggggtacagatcaacaaactgatgtatacccgcctgctgaaaggtgaagatatcaccctgttcagcccgtccgacgtaccggggctgtacgacgcattcttcgccgatcaggaagagtttgaacgcctgtataccaaatatgagaaagacgacagcatccgcaagcagcgtgtgaaagccgttgagctgttctcgctgatgatgcaggaacgtgcgtctaccggtcgtatctatattcagaacgttgaccactgcaatacccatagcccgtttgatccggccatcgcgccagtgcgtcagtctaacctgtgcctggagatagccctgccgaccaaaccgctgaacgacgtcaacgacgagaacggtgaaatcgcgctgtgtacgctgtctgctttcaacctgggcgcaattaatagcctggatgaactggaagagctggcaattctggcggttcgtgcacttgacgcgctgctggattatcaggattacccgatcccggccgccaaacgtggagcgatggggcgtcgtacgctgggtattggtgtgattaacttcgcttactatctggcgaagcacggtaaacgctactccgacggcagcgccaacaacctgacgcataaaaccttcgaagcgattcagtattacctgctgaaagcgtctaatgagctggctaaagagcaaggcgcgtgcccgtggtttaacgaaaccacttacgcgaaagggatcctgccgatcgatacctataagaaagatctggatgccatcgctaatgagccgctgcattacgactgggaagcattgcgtgaatcaatcaaaacgcacggcctgcgtaactccacgctttctgccctgatgccgtccgagacctcttcgcagatctctaacgccactaacggtattgaaccgccgcgcggttacgtcagcatcaaagcgtcgaaagacggtattttgcgccaggtggtgccggactacgagcacctgcacgacgcctatgagctgctgtgggaaatgccgggtaacgatggctacctgcaactggtaggtatcatgcagaaatttatcgatcagtcgatctctgctaacaccaactacgatccgtcacgtttcccgtcaggaaaagtgccgatgcagcagttgctgaaagacctgctcaccgcctacaaattcggggtcaaaacgctgtattatcagaacacccgtgacggcgctgaagacgcgcaggacgatctggtgccgtcaatccaggacgatggctgcgaaagcggcgcatgtaagatctgataatcccccagcctttgcaccaaaccgtcccctctcccttgcgggagagggttagggtgaggggtaataaaaccacaggacacactcatggcatataccaccttttcacagacgaaaaatgatcagcttaaagaaccgatgttttttggtcagccggtcaacgtggctcgctacgatcagcaaaaatatgacatcttcgaaaagctgatcgaaaagcagctctctttcttctggcgtccggaagaagttgacgtctcccgcgaccgtatcgattaccaggcgctgccggagcacgaaaaacacatctttatcagcaacctgaaatatcagacgctgctggactccattcagggtcgtagtccgaacgtggcgctattgccgcttatttctattccggaactggaaacctgggtcgaaacctgggcgttctcagaaacgattcattcccgttcctatactcatatcattcgtaatatcgttaacgatccgtctgttgtgtttgacgatatcgtcaccaacgagcagatccagaaacgtgcggaagggatctccagctattacgatgaactgatcgaaatgaccagctactggcaccttctgggcgaaggcacccacaccgttaacggtaaaactgtgaccgttagcctgcgcgagctgaagaaaaaactgtatctctgcctgatgagcgttaacgcgctggaagcgattcgtttctacgtcagctttgcttgttccttcgcatttgcagaacgcgaattgatggaaggcaacgccaaaattattcgcctgattgcccgcgacgaagccctgcacctgaccggcacccagcatatgctgaatctgctgcgcagcggcgcggacgatcctgagatggcggaaattgccgaagagtgtaagcaggagtgctatgacctgtttgttcaggcagctcaacaggagaaagactgggcggattatctgttccgcgacggttcgatgattggtctgaataaagacattctctgccagtacgttgaatacatcaccaatatccgtatgcaggcagtcggtttggatctgccgttccagacgcgctccaacccgatcccatggatcaacacctggctggtgtctgataacgtgcaggttgctccgcaggaagtggaagtcagttcttatctggtcgggcagattgacgcggaagtggacaccgacgatttgagtaacttccaactctgatggcccgcgttaccctgcgcatcactggcacacaactgctgtgccaggatgaacacccttcccttctggcggcgctggaatcccacaatgtggcggttgagtatcagtgtcgcgaaggttactgcggctcctgtcgcacccgtctggttgcaggtcaggttgactggattgccgaaccgttagcctttattcagccgggggaaattttgccctgttgttgccgggcaaaaggcgatattgaaatcgagatgtgaattggttgtagtgccagatacaacgcttatgcgtcttatctggcctacaacgattacatggcgtagtaatacgctttcacctgctcccagtccgctttggggattggctccagatatttttccagctggcggaagtcatgattaatcgctttatcgcgacgcaagcggcgacgacttttctccaggtcaagaaaaccagcttctgcattaccttctgttttcacatagatatggcgaacataacaacagccatgctgacgattaatgctatgcattttcttaaacgccagcgccactgctttcaacatggcttgccgtacttcgtcagaataaggcgatactgcatgctgggcataccagtcagcaatgctgatgaaccccgccatatcttcagtcaccagcaacgctcgccattcaccctcaattttcaccgcttcaccaaaaacgatcttcggcacgatgacaccggcccgttccagttctttaattaccgcaacctcacggacaatcgttggtcggccgaacggataacgtacggaatgaaacagatgatgcgtcatgcgctttacatacagctttttgccgttgcgctcgacgcattgcaccccgctcataccattacggcgatagttaggctcttcaacccagtcgccctctgttgcccaccagtgattaaattcgtcgtactttgctgaaactgccataccctatcgcctgttatttttattaacgacaatgactataggtggttacctgaggaaaatcttaatgaaacgtgtcgtattaatgaatttcttttgccactactagctggacaccgcttttacccttcatttgcagcgcatagattccaccagccactaccactaatagtgcgcccagcagataaaatgtgaatttaatcaggcggatacagcgatgaattttattcgacagggattaggcatcgccttacaaccagagttaacgctgaaaagcattgcaggtgaattgtgttccgttcctctcgaaccaactttctatcgacagatttcgttgctggctaaagaaaagccggtagaaggcagtccactgtttttactacaaacgtgtacggaacaactcgtggtgaatggaaaaatttgatgtgagacaggatggcgcatgaacgccatcctgcagtagcattactctttattaaggaattttactgccttatcagggaaatcagtaaacagcccatttacacccgctttgttatacagagcatcatataactgattcacatcagtagtgtattcaggcagtttatctgaccgcacggtataaggatgcactaccagtttattctgctgagcatcttgcaccatgccagtgagtttgatattacccggctgcgatgtttcctcaatcaacatatggtaatccggcccgataccgtcggcatattccgccacctgtttcatagcacccggcttaaacatccagtcgtagttgtaattaacccagcttccatccggctgtttctgctgcgtttcattccagtcggtataggcaatcaactgtaccagattgagatccatgcccattttaggttccagctcattcttaatacgcttcagctcatcagcatcaaaacattgcaaataaactttgtcgtccttaccggtgtaaccatatttcttcagcacttccagcgtttttgccgcaatatccttcccttcctgatgatggaaccacggcgctttgatttcaggataaataccgatatttttcccggtagagtgatttaacccctgaacaaattcaatctcttcttcaaaggtgtgcacccggaagtcggacttacccattgggaaacgccccggataagtctgcacttttttaccgttttcaatatcgaaaccttcggtaaatttcagcgacttaatttcatccagcgtgaaatctatcgcgtagtaacgaccgtctttgcgcgcccgatccgggaaacgatcggcaacatcagtaacacgatcgagataatggtcatgcagaacaaccagatggtcgtctttggtcatcaccaaatcctgttccagataatccgctccctgcgcatacgccatcgcttttgctggcagcgtatgctccggcaaatatccactggcaccgcgatgggcgatgactattttttcgttgctgtccgccgccattgcactgcttcccatgactatagtgctcatcatgatcgccatgctaaggtttttcagcgtcaatttcatgccattagcctccgttgcgtttttgcagtaattgttcatggcgacgtttttcgccaatcatcacaacaatcaacaagataaccgccagaatgctgccgccaatcattaccataaagccgccatcccagccgaagaagtccacggtgtagccaacaatcgcgctcgccgccaccgaaccgcccaggtaaccaaacagcccggtaaagcccgctgccgtacctgccgcttttttcggtgccagttccagcgcatgcagaccgatcagcatcacaggaccgtagatcaggaagccgataacaatcatacaaatcatatcgacggttgggttacctgccgggttcatccagtaaacgatagtcgcgatggtcaccagtgtcataaagaaaacgccggttgccccacggttgccacggaagactttatccgacatccagccgcacagcagagtgcccggaatacctgcatattcataaaggaagtaggcccaggaggatttatccagcgcgaaatgcttaacctctttcagataagtcggtgaccagtcgaggatgccgtaacgcagcagataaacgaacacgttggcgatggcgatataccacagcagtttgttcggcagtacgtactgcatgaagatttgcttcgccgtcagctcctgttccgctttttcgttatagtcgtccggataatcatttttgtactcttcgatcggcggcaagccacaggattgcggggtatcgcgcatcatcgcaaaggcgaataatgccaccagaatggcgcagaaagcaggcatatagagcgccgcatgccagtcattgaaccaggccatccccagcaggaacagcagcggcggaataccaccaccgacgttgtgcgcacagttccacactgacacaatgccgccacgttctttctgcgaccaccagtgcaccatagtacgaccacacggcggccatcccatcccctggaaccaaccgcagaggaacaacagtacaaacatcaccgcaatgctcgacgtcgcccatggcacaaagcccataaacaacatcactgccgccgccagaatcaaacctgcgggcaggaaaacgcgcggattcgagcgatccgataccgaacccatgatgaatttcgaaaatccataagcaatcgagatccccgaaagggcaaaacctaaatcaccgcgtgagaatccctgctcaaccagataaggcatagcaagcgcaaagttcttacgaaccaaatagtaagccgcatagccaaagaatatccccaggaaaatttgccagcgcaatcgacgataagtcggatcgatctccgcagcaggtaagcgcgctttgtgtggcgctggtttaaaaatactcaacattgaaagcctccgtggcccgtggtcttatttatgattaacagactgattcagtgggagaacctgccgtttctttagttgccgcgatgttaagaaaacattcagaaattaaatgtgaattgccgcacacattattaaataagatttacaaaatgttcagaatgacgcatgaaatcacgtttcactttcgaattatgagcgaatatgcgcgaaatcaaacaattcatgtttttactatggctaaatggtaaaaaacgaacttcagagggataacaatgaaaactcgcgactcgcaatcaagtgacgtgattatcattggtggcggcgcaacgggagccgggattgcccgcgactgtgccctgcgcgggctgcgcgtgattttggttgagcgccacgacatcgcaaccggtgccaccgggcgtaaccacggcctgctgcacagcggtgcgcgctatgcggtaaccgatgcggaatcggcccgcgaatgcattagtgaaaaccagatcctgaaacgcattgcacgtcactgcgttgaaccaaccaacggcctgtttattaccctgccggaagatgacctctccttccaggccacttttattcgcgcctgcgaagaagcagggatcagcgcagaagctatagacccgcagcaagcgcgcattatcgaacctgccgttaacccggcactgattggcgcggtgaaagttccggatggcaccgttgatccatttcgtctgaccgcagcaaacatgctggatgccaaagaacacggtgccgttatccttaccgctcatgaagtcacggggctgattcgtgaaggcgcgacggtgtgcggtgttcgtgtacgtaaccatctcaccggcgaaactcaggcccttcatgcacctgtcgtggttaatgccgctgggatctgggggcaacacattgccgaatatgccgatctgcgcattcgcatgttcccggcgaaaggatcgctgctgatcatggatcaccgcattaaccagcatgtgatcaaccgctgccgtaaaccttccgacgccgatattctggtgcctggcgataccatttcgctgattggtaccacctctttacgtattgattacaacgagattgacgataatcgagtgacggcagaagaggttgatattctgctgcgtgaaggggaaaaactggcccccgtgatggcgaaaacgcgcattttgcgggcctattctggcgtgcgcccgctggttgccagcgatgacgacccgagcggacgtaacgtcagccgtggcatcgtgctgctcgaccatgctgaacgcgatggtctggacggatttatcaccatcaccggtggcaaactgatgacctatcggctgatggctgaatgggctaccgacgcggtatgccgcaaactgggcaacacgcgcccctgtacgactgccgatctggcactgcctggttcacaagaacccgctgaagttaccttgcgtaaagtcatctccctgcctgccccgctgcgcggttctgcggtttatcgtcatggcgatcgcacgcctgcctggctgagcgaaggccgtctgcatcgtagcctggtatgtgagtgcgaagcggtaactgcgggtgaagttcagtacgcggtagaaaatttaaacgttaatagcctgctggatttacgccgtcgtacccgtgtggggatgggtacctgccagggcgaactctgcgcctgccgcgctgccggactgctgcaacgttttaacgtcacgacgtccgcgcaatctatcgagcaactttccaccttccttaacgaacgctggaaaggcgtgcaacccatcgcctggggagatgcactgcgcgaaagcgaatttacccgctgggtttatcagggattgtgtggtctggagaaggagcagaaagatgcgctttgatactgtcattatgggcggcggcctcgccggattactctgtggcctgcaactgcaaaaacacggcctgcgctgtgccattgtcacgcgtggtcaaagcgcgctgcatttctcatccggttcgctggatttgctgagccatctgcctgatggtcaaccggtgacagacattcacagtggactggaatctttgcgtcagcaggcaccagcccatccttacagtcttctcgaaccacaacgcgtgctcgatctcgcttgccaggcgcaggcattgatcgctgaaagcggtgcgcaattgcagggcagcgtggaactggcccatcagcgcgttaccccgctcggcactttgcgtgcaacctggttaagttcgccagaagttcccgtctggccgctacccgcgaagaagatatgtgtagtggggataagcgggctgatggatttccaggcgcatcttgcggcggcttcgttgcgcgaactggatctttcggttgaaaccgcagaaatagagctgccggaactggatgtcctgcgcaataacgccaccgaatttcgcgcggtgaatatcgcccgtttccttgataatgaagaaaactggccgctgttacttgatgcgcttattcctgtcgccaatacctgcgaaatgatcctgatgcccgcctgcttcggcctggccgatgacaaactgtggcgttggttgaatgaaaaactaccttgttcactgatgcttttgccaacgctgccgccttccgtgctgggcattcgtctgcaaaaccagttacagcgccagtttgtgcgccagggtggcgtgtggatgccgggcgatgaagtgaaaaaagtgacctgtaaaaatggcgtagtgaatgaaatctggacccgcaatcacgccgatattccgctacgtccacgtttcgcggttctcgccagcggcagtttctttagtggcggactggtagcggaacgtaacggcattcgcgagccgattctcggccttgatgtgctacaaaccgccacgcggggtgaatggtataagggcgatttttttgcgccgcaaccgtggcagcagttcggtgtaaccactgatgagacgctacgcccgtcgcaggcagggcaaaccattgagaacctgtttgccatcggttcggtgctgggcggatttgatcccatcgcccagggatgcggcggcggtgtttgtgccgtcagtgctttacatgccgctcaacagattgcccaacgcgcaggaggccaacaatgaacgacaccagcttcgaaaactgcattaagtgcaccgtctgcaccaccgcctgcccggtgagccgggtgaatcccggttatccagggccaaaacaagccgggccggatggcgagcgtctgcgtttgaaagatggcgcactgtatgacgaggcgctgaaatattgcatcaactgcaaacgttgtgaagtcgcctgcccgtccgatgtgaagattggcgatattatccagcgcgcgcgggcaaaatatgacaccacgcgcccgtcgctgcgtaattttgtgttgagtcataccgacctgatgggtagcgtttccacgccgttcgcaccaatcgtcaacaccgctacctcgctgaaaccggtgcggcagctgcttgatgcggcgttaaaaatcgatcatcgccgcacgctaccgaaatactccttcggcacgttccgtcgctggtatcgcagcatagcggctcagcaagcacaatataaagaccaggtcgctttctttcacggctgcttcgttaactacaaccatccgcagttaggtaaagatttaattaaagtgctcaacgcaatgggtaccggtgtacaactgctcagcaaagaaaaatgctgcggcgtaccgctaatcgccaacggctttaccgataaagcacgcaaacaggcaattacgaatgtagagtcgatccgcgaagctgtgggagtaaaaggcattccggtgattgccacctcctcaacctgtacatttgccctgcgcgacgaatacccggaagtgctgaatgtcgacaacaaaggcttgcgcgatcatatcgaactggcaacccgctggctgtggcgcaagctggacgaaggcaaaacgttaccgctgaaaccgctgccgctgaaagtggtttatcacactccgtgccatatggaaaaaatgggctggacgctctacaccctggagctgttgcgtaaaatcccggggcttgagttaacggtgctggattcccagtgctgcggtattgcgggtacttacggtttcaaaaaagagaactaccccacctcacaagccatcggtgcgccactgttccgccagatagaagagagcggcgcggatctggtcatcaccgactgcgaaacctgcaaatggcagattgagatgtccacgagccttcgctgcgaacatccgattacgctactggcccaggcgctggcttaaccgaccttttgatgcccggtaagcacattgcttatcgggcatttttgcgagcgcgattccacgcaccatgtatgcgttgcaacgctttgaaaattcctctgaaaatgtctcgcaaaggctgaaactgacagatgtcaaaggcccgggatagacgtaatgtcgcgtcatcataaatatcaggtgacggacaaccatgaccgaatcaacaacatcctccccgcatgatgcggtgtttaaaacctttatgttcacacccgaaaccgcaggggattttctcgaaatacatttaccagaaccactgcgcaagctttgcaacctgcaaaccttacgcctggaacccactagttttattgaaaaaagtttacgcgcttactactcggatgttttgtggtccgtggaaaccagcgacggtgacggctatatctactgcgtgattgaacatcaaagctctgcagaaaagaatatggcttttcggctaatgcgctatgccactgccgccatgcagcgtcacctggataaaggctatgacagagttccgctggtggtgccattgctgttttatcatggcgaaacatcgccctacccgtactcacttaactggctggatgagtttgacgatccgcaacttgcccggcagttgtacaccgaagcttttccgttggtggatatcaccatcgtacctgacgatgagatcatgcaacatcggcgtatagctctgctggaactgattcaaaagcatattcgcgaccgcgatttaatcggcatggtcgacaggatcaccacgcttttggttagaggcttcactaatgacagccagctacaaacactgtttaattatctgctgcaatgcggcgatacctcccgtttcacccgttttattgaggagattgccgaacgttcaccactacaaaaggagagattaatgactattgctgaacggctacggcaggaagggcatcaaattggctggcaggaaggtatgcatgaacaagccattaaaattgctttgcgcatgctggaacagggcattgatcgtgaccaggtgctcgcggccacccagctaagcgaagccgatctggcagcgaataaccactaattaacacaggcccacagccgatccccatgggcctttgatatcaataactaccttttatgcgtggcccatttttgcctgatttaaacatcgccagtcgttgatccagggcatcgctgtagagcatcgtgtcaacgccaacagcgacaaagttcgctccccacgccaggcattgctgcgccatatcaggagccacagccagaaaaccagccgctttacccgcagcacggatccgccgaatactggtttcaataattcgctgcacttccgggtgccctgcgttatccgggtagcccaacgacgcagaaagatccgcaggtccaataaacacgccatcaatcccttcgacgtcgaggatttcgtccaggttatccagtgccgttttactttccacctgcaccaacagacaaagtgaatcgttaacttgcgccatgtaattctcaatgcgtccccagcgcgcagcccgtgccacactggccccaacaccacgctcaccgtagggagggttggacaagttttgccggagggggaatgtgccggtgcagtaaaccggcacagagtggcggaatcagacagataaggtcatggactcaataacctcaatccagccatgctcactggcgatatcctggccgtttaaccaacggcgcagcatattcagtgccatcattgcgcacacttcctgacggatagccaggctgtagcgtgtagtgctgaaacgcacacgcagagcgaaagtgccgtctggcgtggctagcgcaaagttgagatgctcgttctcgaaacccgaaacagccagtgccagcccggcaaaatggttggcccgccgttctgtaatccagtgcgcagtttgcgccagggtttcttcctgtgaaggaaccacttcacacgccagcaatggagcacctgcgcgagaaagttgcaaagccaataaaccgccggtgaattgctcgctcaacgtcaggctgaactggcggttttgcaattcgcgactgatctgcgcgggcagtccttcggtgccttcgaaaatcacgctctgtccggcaacacgtttaacgtccagccacagtttttccatcgcctgttgctcgcttgccggtccggtgagtttcagttcgataatcggcattgaagagcgatagcccattgttacgcccggcggcagttgtagagtgtccaggctttgtgccagatcgctttccgaacgaccaaaggtagttaaacgcagacaaaccggcggctgtggtaaagaaaaacgctcgcgcagacgcggcaggatttcgtgctcgaccatcaccttaaattctgacggtacgccgggagtaaagaacatcaggcaacgattaagctgcacggcaaaaccacaggcggtgcctaccgggttattgataaattcagcactggcaggcagctccgcttgtttacggttgctcggtgccattactcgtccacgttcgtggaaatagcgttccatctctttgagccaggcttcatgcagcaccaggccttcaccttttgctgtcgcagcggcgagtgcgcttaaatcatcgctggtcggtcccagcccgccgttaacgatcagcacatcggcgtgctgactacgttcgcgaagaatggtgactaagtcatcaaggttatcccccaccgtattgcggcgagataatggcagcccctgatgaaagaaaaaatcggccagccaggcagcgttagtgtcaacgatttgcccgtgtaacacttcatccccggtggatagcatttccacttttaacatggttatctcctgcttttgttatcgaatcactataacgcaaagggagataaggcgtagtaagaaactgaatggcgcgacagaatgccgcgccggaagggatcagaaactggcgttaaccccaacatacgggccgtcagccacggcgttgtcgcggttaccgtctttacccgacagattcaggtagcgataacccgcctcaatactgactggacgcataatggtgtaacgcgcgccagcattcgcttcctcataactttgaataccgctggagagcgaatccggagagtagtaatactcgccaaacaaacggaagctgttgccaattttccactgcaaaccacctcctaccgctgcggcataaccttcatcgccgtaattcgggttggtgtaaacgccttttccgccaacggtcgccattaacggcccgagaggcagattcaaccccagccccacgcccgcgacgtcaccgtcgtcgtcgttatgtgtccagttaccgcttaaagccaggcccgtcgattcagtcccaaaaccgacaccaatattggtgtattctttacccgcctggccgctgatgctcattgcattgaccgatgcagaaaccaacagcattccggccagacctgctagcgcaatttttttcattatcccctttcccacaagcaattaatcaaaattcccaaagctgcgggattgtactgcctggcacagaggattcaatgagcgaaaaaagggatctagtcacttattgtaactaaatacttcttaaataattaaacgccgaaaaaataaacacactttaccgatacacacaaaaataataataagtgcagttatcattgcaaaagagattactgtcactttcacatatttctgagttaccgtattctcatggtttctttttatttataaggaatacccctatgcgacaacggactattgtatgccctttgattcaaaatgatggtgcttatttgctgtgtaaaatggccgacgatcgcggcgttttccccggtcaatgggcgctttcgggtggcggcgtggagtctggcgaacgaattgaagaggcactacgccgcgaaattcgcgaagaactgggagaacagctgcttttgacagaaatcacgccgtggaccttcagcgatgatattcgcaccaagacgtatgcagatggtcgcaaggaagagatttatatgatttacctgatttttgactgcgtttctgccaaccgagaagtgaaaataaacgaagagtttcaggactacgcgtgggtaaaacctgaagatctggtgcattatgatttaaatgttgccacccgaaaaacgttacgtttgaaaggtcttctttaacaatgatgacagccatcactggctgtcagattgaaaatttagtggttaacgaattccccatccagataaactttgcctttttccacatgcatgactaaaccatccagataatcaggtttaaatgtcgcatcacgcttatttttagcaatatatgtcaggcaatgattatgggtgaaaataacgatatttttatcaggcgctttgctttgtaagtccttaattgcactataaatctcattaccgcactgaagaagtcgtttatctaccgtcagctttttacccgcggaaaaccaggtcgccgactgaatggtccggacggtattactggaataaagatcgaaatcagggatgtcagcgctaaaagcgttgcccagttcacgggcatcctgggtacctttaaccgtaatacctgttttatctgacaagcattgattggttgaacgatcgcaacgttcagcatggcgaaacaaaacgacaaccgggtgctgctgtgccagtctggccaatgttttattgtcgatacgtggcaaaccattgctactccaggcggcatgagtacccagtccggcaattgcagcgagcgccagtaaaatgatgaaatatttttttgacttcaatgatgagcggcaaaaagctaacacgtaaactccacctatagacaagcgcaaccagacaattaccgtaaaattgagcgacatttctggcgataattagcagttggtgtaatattaaaaatcctacgatgtcggcaaaatgcctcaaaattttgccaaatgcaaagcctaaataagaaaaaatataaaaatttcaatatttacgtctaatattagtttcttaaggttaagttaatattctatccttaaaatttcgctccaaatggcaaaatatacacaacactctttatagcaaatataagtggacaggtattcaatggcggaaggaaaagcaatgtcagaatttttgcctttttcgcgaccagcaatgggcgtggaggaactcgctgcagttaaagaggttctcgaatccggttggatcacaaccggtccgaagaatcaggcgcttgagcaagccttttgccagttgacgggaaatcagcatgccatcgcggtcagttcagccaccgccggaatgcatatcacgctaatggcgttggaaattggcaagggcgatgaagtgattacgccttccctgacctgggtttcaaccctcaatatgatttccttgttgggtgcaacgccggtaatggtggatgtcgaccgcgatacgctgatggtcacgcctgaagcgatcgagtcagccataacgccacgcactaaagccatcattccggtgcattatgccggtgcgccagcagatattgacgccattcgcgccattggcgaacgttacggcatcgcagttatcgaagatgctgcccatgccgtcggtacgtattacaaagggcgacatattggcgcaaaaggtaccgctattttttcatttcatgccattaaaaatattacctgtgcggaaggtggcctgattgtaactgataatgaaaaccttgcccgccagctacggatgctgaaatttcacggtctgggtgtcgatgcctatgacagacaaacctggggccgtgtaccgcaggctgaagtcttaacaccgggctataagtacaatctgaccgatattaacgccgcgattgccctgacacagttagcaaaattagagcacctcaacacccgtcggcgcgaaattgcccagcaatatcagcaagcactggcagctctcccctttcagccattaagccttcccgcctggccgcacgttcacgcctggcatctgtttattattcgtgtcgatgaacaacgttgtggtatcagtcgcgatgcgttgatggaagcgttaaaagaaagaggcattggtaccgggttacatttccgcgccgctcacacacaaaaatattatcgcgagcgttttcccacgctgtcgttaccgaataccgaatggaatagcgaacgcatctgttctttgccgctgttcccggatatgactaccgccgatgccgaccgtgtcatcacagcccttcagcaactcgcaggacaataagccatgtttgaaatccaccctgttaagaaagtctcggtggttattcccgtttataacgagcaggaaagcttaccggaattaatcaggcgcaccaccacagcctgtgaatcgttggggaaagagtatgagatcctgctgattgatgacggcagtagcgataattccgcgcatatgctggtcgaagcctcacaagcggagaacagccatattgtgtctattttgcttaaccgcaattacgggcaacattcagcgattatggcgggattcagtcacgttaccggcgacttaattattacccttgatgccgatctccagaatccgccagaagaaatcccccgcctggtggcaaaagccgatgaaggttacgacgtggtagggactgtacgccagaaccgccaggacagctggtttcgtaaaacagcttcgaagatgattaaccggcttattcagcgcaccaccggcaaagcgatgggtgactacggttgtatgctgcgcgcctatcgccgtcatattgtcgatgcgatgttgcactgccatgaacgtagcacctttatcccgattctggcgaatatcttcgcccgccgtgccattgaaattccagtacatcatgccgagcgtgagtttggtgaatccaaatacagttttatgcgcctgattaatttgatgtacgacctggtgacctgccttaccacaacgccgctacgtatgctgagtctgctcggcagcattattgcgattggaggttttagcattgcggtgctgctggtgattttacgcctgacctcggaccacaatgggcggcagaaggcgtctttatgctatttgccgtgctgtttacttttattggcgctcagtttatcggcatgggattactcggtgaatatatcggcaggatctacaccgatgtccgcgcccgcccccgctattttgttcagcaagttatccgtccatccagcaaggaaaatgaataatgaaaaccgtcgtttttgcctaccacgatatgggatgcctcggtattgaagctctgctggctgccggttacgaaattagcgccatttttacccataccgataatcccggtgaaaaagccttttatggttcggtggctcgtctggcagcggaaagaggcattccggtttatgcgccggatgacgttaatcatccgctgtgggtggaacgcattgcccaactgtcgccagatgtgattttctctttttattatcgccatcttatttgcgacgaaattttgcagctcgctcccgcaggtgcatttaatctgcatggttcgctgttaccaaaatatcgtggtcgcgcgccgctgaactgggtgctggtcaacggtgaaacggaaactggcgttacattgcaccgaatggtgaaacgtgccgatgccggggccattgtggcgcaactgcgcattgccattgcgccagacgatatcgctattacgctgcatcataaattgtgccatgccgcgcgccagctactggaacagacattacccgccattaaacacggtaatattctggaaatcgcccagcgcgaaaacgaagccacctgttttggtcgcagaacgccggatgacagtttccttgaatggcataaaccggcatccgtactgcacaacatggtacgtgccgttgccgatccgtggccgggtgccttcagctatgttggcaatcagaaattcaccgtctggtcgtcgcgtgttcatcctcatgccagcaaagcacagccggggagcgtgatttctgttgcgccactgctgattgcctgtggcgatggcgcgctggaaatcgtcaccggacaggcgggcgacggcattactatgcagggctcgcaattagcgcagacgctgggcctggtgcaaggttcacgcttgaatagccagcctgcctgcaccgcccgacgccgtacccgggtactcatcctcggggtgaatggctttattggcaaccatctgacagaacgcctgctgcgcgaagatcattatgaagtttacggtctggatattggcagtgatgcgataagccgttttctgaatcatccgcattttcactttgttgaaggcgatatcagtattcattccgaatggattgagtatcacgtcaaaaaatgtgatgtcgtcttgccgctggtggcgatagccacgccgattgaatatacccgcaacccgctgcgcgtatttgaactcgattttgaagagaatctgcgcattatccgctactgcgtgaagtaccgtaagcgaatcatcttcccgtcaacttcagaagtttatgggatgtgtagcgataaatacttcgatgaggaccattctaatttaatcgtcggcccggtgaataaaccacgctggatttattcggtatcaaaacaattacttgatcgggtgatctgggcctatggcgaaaaagagggtttacagttcaccctcttccgcccgtttaactggatgggaccgcgactggataaccttaatgcggcacgaatcggcagctcccgcgctattacgcaactcattctcaatctggtagaaggttcaccgattaagctgattgatggcggaaaacaaaaacgctgctttactgatattcgcgatggtatcgaggcgttataccgcattatcgaaaatgcgggaaatcgctgcgacggtgaaattatcaacattggcaatcctgagaacgaagcgagcattgaggaactgggcgagatgctgctggcgagcttcgaaaaacatccgctgcgccatcatttcccaccgtttgcgggctttcgcgttgtcgaaagtagcagctactacggcaaaggatatcaggacgtagagcatcgtaaaccgagcatccgcaatgcccaccgctgcctggactgggagccgaaaattgatatgcaggaaaccatcgacgaaacgctggatttcttcctgcgcaccgttgatcttacggataaaccatcatgaccaaagtaggcttacgcattgatgtcgatacctttcgtggcacccgtgaaggcgtgccgcgtctgctggaaatcttgagtaagcataatattcaggccagcatttttttcagcgtcggcccggacaatatgggccgccatctctggcgactggtgaagccacagtttttgtggaagatgctgcgctcaaatgcggcatcgctttatggctgggatattttactggcaggtacggcctggccaggtaaagagattggtcatgccaatgccgatatcattcgtgaagcggctaaacatcacgaagtcggcctgcacgcctgggatcaccatgcctggcaagcccgtagcggtaactgggatcggcaaacaatgatcgacgatattgcacgcggccttcgcactctggaagagattatcggtcaaccggtaacctgttctgccgctgcgggctggcgtgccgaccagcaggtgatcgaagcaaaagaagcgttccatttgcgctacaacagcgattgtcgtggggccatgccgttccgtccactgctcgaatcaggaaaccccggcactgcgcaaattccggtgaccttacccacctgggatgaagtgattggtcgggatgtgaaagcagaagattttaacggttggttactcaaccgcatcctgcgagataaaggcacgccggtttataccattcatgcagaagttgaaggctgcgcttatcagcataattttgtggatctcctcaaacgcgcagctcaggaaggcgtgacattttgccctttaagcgaactgttatcagagacgttgccgctcggacaagttgttcgcggaaatattgccggacgtgaaggctggctgggttgccaacaaattgcgggtagtcgctgatgaaatcggtacgttaccttatcggcctcttcgcgtttattgcctgctattacctgttaccgatcagcacgcgtctgctatggcaacccgatgaaacgcgttatgcggaaatcagtcgagaaatgctggcatccggcgactggattgtgccccatctgttagggctacgttatttcgaaaaacccattgccggatactggattaacagcattgggcaatggctatttggcgcgaataactttggtgtgcgggcaggcgttatctttgcgaccctgttaactgccgcactggtgacctggtttactctgcgcttatggcgcgataaacgtctggctctactcgccacagtaatttatctctcattgtttattgtctatgccatcggcacttatgccgtgctcgatccgtttattgcattctggctggtggcgggaatgtgcagcttctggctggcaatgcaggcacaggcgtggaaaggcaaaagcgcaggatttttactgctgggaatcacctgcggcatgggggtgatgaccaaaggttttctcgcccttgccgtgccggtattaagcgtgctgccatgggtagcgacgcaaaaacgctggaaagatctctttatttacggctggctggcggttatcagttgcgtactgacggttctcccctggggactggcgatagcgcagcgggagcctgacttctggcactattttttctgggttgagcatattcaacgctttgcactggatgatgcccaacacagagccccgttctggtactacgtgccggtcatcattgccggtagcctgccgtggctgggattactccccggtgcactgtacacaggctggaaaaaccgcaagcattccgcaaccgtctatttgttgagctggacgataatgccgctgctgtttttctccgtcgctaaaggcaaattgcccacctatattctttcttgctttgcacctctggcaatgctgatggcgcattacgctttgctggcagcaaaaaataatcctctggcgttgcggattaatggctggattaacatcgcttttggcgtcactggcattattgccacatttgtggtctccccctggggaccaatgaacacgccggtgtggcaaaccttcgagagctataaagtcttttgtgcctggtcgattttttcgctatgggcatttttcggctggtacaccttaacaaacgtcgaaaagacctggtcttttgccgcgctttgcccgctggggctggcgttgctggtaggattttcaattcctgacagagtcatggaaggaaaacatccgcaattttttgtcgagatgacacaagaatcacttcagccaagccgctatattcttactgatagcgtcggtgttgccgcaggtctggcatggagcctgcaacgcgatgacatcatcatgtatcgccagacaggtgagttgaaatacggccttaattatccggatgcgaaagggagatttgtcagcggtgatgagttcgcaaactggcttaatcaacatcgtcaggaggggattattacactcgtgctttcggttgaccgcgatgaagatatcaacagtctcgccattccgcccgcagatgccatcgatcgtcaggagcgtctggtgctgattcagtatcgtcccaaatgatctggctaacattagtctttgccagcttgcttagcgttgccgggcagttgtgtcagaaacaggcaacctgctttgtggcgataaacaaacggcgcaaacatatcgcgctgtggctgggactggcgctggcttgtcttggtcttgccatggtgctctggctgctggtcttgcagaacgtaccggtaggcattgcctacccgatgttaagtctgaattttgtctgggtgacgctggctgcagtaaaactgtggcacgaaccggtatcgccgcgtcactggtgtggggtggcgttcattattggtggcattgtgatcctcgggagtacggtgtaatgggcctgatgtggggattattcagcgtcattattgcctcagttgcgcaattaagcctgggttttgcggcgagtcatctgccgccgatgacgcacttatgggattttatcgcggctctgttagcttttggcctggatgcccggatactgttactcgggctgctgggttatctgctttccgttttttgttggtataaaacgctacataaacttgcgctaagcaaagcctatgccttgctcagtatgagttatgtgctggtatggattgcttcaatggtacttcccggctgggaagggactttttcgctgaaagcactactgggagtagcctgtattatgagcgggttgatgctgattttcctgcccatgacaaaacaacgttactgagttttccgtgccactttacactgccgttcccactcatcggggctataactgcttgccgagaggactttcaccgtatgcagcttttcacgattaatacaatatagcgcattctgcaaaggcgagagtaaatcccccactttcacggcgaagtcactcttcacttcggcgatcatttttatcgcgccgccagcatcgcagagcataagtacatgtctgttatcttgtttattgcagcacgattttttgaccagccattccattgcattatcctgtttgctaagagttttcacatcaatttacagattaacagataaactctttatcaacggcaatggaatggcagaaatgagaagtgaaacggagggttaattattgctgacgttgcacccactcttttagcgcctgacgtgaaattttaataccgccgtttttcagttcaggcggcaacgttaaccaacgcaccggttgctgaaaacgggccagcttatctttcacccattcactaagatcaacgctctcgtggtcatactccatcaccgccaccggtcgatgaccaaactccttgtcggcaacggggacgataaacacctgcaaaaccgcaggatgtgcagcaattacgcgctcgacttcttccggctgaataccctctccgccactgaagaatagattgtctaaacgtccgacaatggtcagcttgccattatgcatctcaccgcgatcgcgcgtagcgtaccagccttcgtcattaaccagtgaaaccagttgcccgttacgccagtaaccttctgccatactggcagcccgcagccacacttcattattaacgattttcacttcccgacccggcagcggcgaaccaacgtctgccaggccgtcggcttctttcgcacacaccgtggaggcaaactcggtcagaccatagccgcaaaagcaacgaatcccctgctcgcgcgcctgttccgtcaactcgaccgggatagccgcgccgccaagtaacaccgctttcagggaaacggaactgcggttaaccagcaaacgccagagttgtgttggcaccagtgaagcgtgagtacagcctgccagcatttgctccaatggctgtttatcacgcaccgtcatccgcgcaccagcgtataaccagcgccacataattccctgaccggagacgtgaaacagcggtaaagagagcaaccagtcatcgtgatcgccaaacggaatcaacgataacaccccttcggcactggcaagatgggcctgataagtatggacagcggctttcggcaacccggtagaacccgaggtcaacgtcattgagcacagacgcgtcggctgccacgtagcggcatgtgcgccttcaacccgctgaatgtgcagcgacgttaacgccggaaacgtgttttccccatccggcaccagcgcaaattgcagcgtcagattgggcagcaattcttcaagcaacggttgcggcagctgagggttcacgggcaacacccgcgccccgcattgcagtaacgccagccaggcgagcagcgtttgcggcgtattccacgcccgcaacatcacgccgctgccctcaacaacgccctgcgccgcaaagcctgaggctaattcatcgacgcgagcacaaagctcgcgccagttaagttgctcgtcattaagccgtaaggcgatggcttctccccgcacttgccgccagtgacgccacggccagtcagagaagatcataacaaccgctccagtgcatcaacttccacgacaggcagcgtgctacccggccagcgacgtacctgctgcgcctgcatcagatccagcgtgtccagccctggaatggtgtccggcgttaaccaggcggcaatccgcgccagttgcgttaagcctaagctcgattcaatggaagaactgatcaccgccgtcagccccagcgcgtgcgccgcctgtacctgctcgcgtactttctccagactgcccgtgagcgtgggtttgataactaccgcacgcacgccctcttcagccacaaaggcaaaatccggctcgcgcaggctttcatcccaggcaatggcaatgccggtttcacgggcaaacgctcgcgaatcatcgcgggttttgcacggctcttcgagaaacgcgatgcggtggcgataatccgggttaacatatttggcaaactgctggcctttcagcggtgtccaggcgcgatttgcgtcaagacgcaaatgcagatccggaattgcctccagcaacagattaaccaccatgccgtcgcgcacggcttcgtacaatcccactttgaccttcgccactttctcgcctggcatatcagcaagtttgaggatcagatcgtcaggatcgccattacacagtggtgccgcacggtaattggccgcctgcgggagcgtatctgccagctccgccaatgcacagcttacgccaaaggcaacggaaggcatctgcggtagctcgcaatcgcctgccagccagttatttacccaggcaagcagcacgctttgcgcctcttcccaggtttcctggctgaagcccggcagtggggagatctcccccacccttcgcgctcgccctcacgcaggcaaacgtacagcccgtcgcgggtttttaaccgcctgtcgcgcagaaccacccccgcgtccatggggatctgccagcggtatacctgcgcgctacgcattacggattccgtttaaatttgctgaaatcaggctgacgtttctggttgaaagcgttgcgaccttcctgaccttcttccgtcatgtagaacagcatggtggcgttgcccgccagctcctgcagccccgcctgcccgtcacagtcggcgttcagcgcagctttcaggcagcgcagcgccatcgggctgttttgcagcatttcgcggcaccaacggacggtttctttttccagatccgccagcggtaccacggtgttgacaaggcccatatccagcgcctgttttgcgtcgtactgacggcacaggaaccagatttctcgcgcttttttctgcccgacgatacgagccatgtaggaagcgccccagccgccgtcgaaggaaccgactttcgggccagtctgaccgaagatggcattatctgctgcgatagtcaggtcgcacatcatgtgcagaacgtgaccaccgccgatggagtagccagccaccatcgcgacaaccggtttcggacaggtacggatctgacgctggaagtccagcacgttcaagtgatgtacgccggaatcatctttatagccgccgtaatcaccacgcactttctggtcaccaccggagcagaacgctttatcgcctgcgccagtcagaatgatcacgccgatattgtcgtcataacgcgcatctgccagtgcctggatcatctcttttaccgtcagaggacggaaggcattgcgcacctgcggacgattaatggtgatttttgcgataccgtcggtggatttttcataacgaatgtcctcgaaaccttcggagcagtcgtgccattcaaccggtgcgtaaagcattgcttcatcaggataaatcatattgtgtcctttagtcagaaacgcaagatctgcgccagacttgcgataacgccagcgggattttcccgatgcgcgttatgtccggcgcgaggaatgacatggcagtcggcagccagttccgccgccagggcgcggaatttgctgtcacgttcaccacataaataataaaacgcaaatgtgcgggcgctaaggttagcacgtaaatcaggctggacggcgagagaagtcgcctccagcatggcggcaagggttgcgccattattgttgctgcgcagcgccaccagctcccggcgttgatcgtcattgagcgaggcaaaaacaggctgttgataccagtcggcaaataccgccgttaacggttctgtgcgaaaacgctgcgcccattggcgatcggaacgctgacgttccgcacgttgttcagcattttgcagccccggatgcccgccttcgacaataaccccacaaagccccgccagcccctggcaagccgccatcatcgccacccgtccgccaagcgagtaccccaccagccagaagtcaaggatgttgtaactaaccaaggttttacgcagtaagtcggtgacatcatcaaatccatcgacgctaatcgccgccgaaccaccatgacctgggagatcaacatacaaccgtgagtagtcggcaaacgcctcgcccacttcttgccattcgtggcaatcgccggaaaaaccgtgcaaaaacaccagccagggtaaacctggttttccgtgttttgcctgcgcgtgcaggatcataaatggcttacctgcgccagaagttgctggagcgtttgcgcaccatcggtgtcgttaaccaccatttcaatcaccgtggtggttggcgtgcgccaggcgtcggcaaatgccgtttcaagttcctgccagttttgcggacgatgatatttcagctcgaacatcgcggcggcgtgctcaaaatggacgttttgcggcatcagatagaaacgctcacgctcgctttgcggcgttggcaacagcgagaaaatttgcccgccgttgttgttcaccacaattaataccagcggcgcagaaacctgacgcaataacgccagcgcgttgagatcgtaaagtgcggagagatcgcccacaatcgccagcgtcggtttgccgcttgcccgctgaacgcctgcggcggtcgaaagcagtccgtcgataccgctggcccctcggttgctgtacaccgggtaacctgccggaagttgcgaaagcgcatcaatcagacgtaccaccaggctgttaccaacaaacaattgcccctgttcaggcagatagtcgcagatgcgatgcgccagttgcgcttcgccaaacgcatcacggcgggcaataaccgcctgcattgcctgttccgccaggcgcgggatttcaacgcaccagggctggcgtttttctgccggatgcagctccagccagtcggcaatattggcaattaagcgacgtccgcgatggtgtgccggatcaagtcgcccttcaatgtcatcaacaatccagtactcttctggttcacagcttgcctgccattgcaggagccgtttgcccgtcaggctgcttcccagttgcaccacaatttgcgcctgctgcagctcgctggtcgctttggcattgcctaaccaaagatcggcacacggcagcggctgcccggtttgtgacagcacatcgccaatcagcggccagccaagagtttgcgcccacagggcaacttttttgccctcttccgcactcatgcgcccggcaaccaccacgccgcgcttttgtcgccagaagaaccagtcgcgctgtttttcactttccagacgaggcgcttcacgcagccacggtttgtcgtcctgccaccagtcacccagacgctgttgccagctaagcccggtatcgtccatttcgccatacagcggttcagcaaacgggcagttgatatggactccccccgcatgaagcgtaccgagagcgtggtcgatggtagaaaccagccaacgtgcggggatatcccgggtcgggcgcggcaatgaaatactgtgcgtggggtgagaggcgaacattcccggctggcgaattgcctgattcgcgccgcagtcaattagctccggcgggcgatcggcggttaacaggatcagtttttctccggttaacccagcttcaatcagtgccggatagagatttgctaccgccgtgccggaggtcacaatcaccgccaccggctgcttgctgactttcgccagccccagcgccagatgtcccagtccacgctcatcgaaatgggtgtggtgaatgaatgtggaattctccgccgccgctaacgttaacggtgtagaacgcgagccaggggcgatacagatgtgtctgacgccgtgacgcgttaatgcttccagaatgaccgccgcccagcgtcggttaaatgcgcttactgacatgagtttgtccggtatcaatattgcggctaagtataaggagctacaaaaatagattattgatatgaatcggtaatgatgcgactcattactattccatctgtaataaagtacgcagccctgccgctttgttgtcgatttcctgccactcttgctcggggtcggaaccacggacaatgcccgcgccagcatataatcgcacgacattgccgctaatttttgctgagcgcagggaaacgcagaattcgctttgttgtaatgagagatagcccgcagaaccggcgtaccattctcgggtgaacggttcgtgacgggcgataaactgtcgcgccagatcgcgcggtaagccagcaactgctgccgttggctgcaactgatgtaaacagatcacatcatccgctttgttgagtgaagtccagatacagcggcgaagatgctgcactttacgcagacgcagtacctgcggcggtaaaacatccagcgtctgggtatcggcctgtaatcgttggcagatatcttccaccaccaacatgttctcgcgctggtttttatcatccgccatcagccactcacctaaatgctgcgcctgcttatcatcaggatgatttgctaccgttcccgccaacgcttcagtacgcagcgcgttgtcacgccgccgccataaccgttcaggtgaagagccaagaaaagcattttcgccatcaaaggccatgtaaaaatggtagcaattcagattcagtcgacgactggcagccatcattgctgccgcattgaccggacttgcgaaatgcaagtcagttgcccgagcaagaaccactttgtcgagctcaccttcggcgatggttttcgttgccagttcgattaattgcgtccagcccgttttgtccggccagtgttgttctcgcgtggtggttaaatgtaatccaggcaaaggcttgatactcaccagtgcggcgataaattcttttgccttgattgcatcgtgctgaagggagctttcgctgaatagcgttagccgcagcgtggctttaccgccacaacgtcgccattccaggcgtggtaaaagtaaattgccctgcgacgggtcaaacgcattcagcccccagatgcgtaagtcggcgtgttccgggtgctggcgaagaaaacgttgtgcctggtccaacgacgtaaaacgggtaatcgcgcccaggacggcagcttcttcatcaccattacgttgttgccagtagaattgcgggtacgtttgctgactggccagccagctcaaggcatcaaaagcgtctttgagagggaaaggaatatcgataacccgaatgccgggtgtcgccggaatctcttgcgacaaatggcgcagtagattttccagcgccgtagtaagtgattgcacgcggacctctccctgttaaaagcctcacattatacggggtactacaaaaaaaatgcagtaccccggtgtagggaggttttaacggcgtgccagcaacagtcctagtaccagcccaacggccgcgcccacaccaattccttgccagggtttttcgtggacgtagtcatcagcacgataaactgcctgcttcgcccgatagtaataactgtctgaagcctggctaacccgttttttcacatcatccagcgctttttctgcacgcgctttcagctcaacatatttctgatcggcgggatcgccagaggagcggagcacctcttccagtgtttcactaagcagcgtcaggtcgtcatcgatacgtgtatcaccaaactgattagacattctcgttctccatttgcgtaaaacctgtcactaactatagacaagggttgttgattacgcctgaattacctcgcgtgccatcccaatgtgtgggataccatcttcttcatagacctccgtcacagggataaaaccgaaactctggtagaagttttgcagatgcgcctgcgccccgaggtaaacaggcttatcaggccagtgatgcgtacatgtttcgagtgttttactcatcagttgctgccccactttttcgccacgcaacgcttcactgacaatcacccgacctataacgaccggctcaagatcatcatcacttttcagaatcctcgcatatgccaccagttcatcatttttccaaccaagaatatggcgattatcccccgtcaaatcatcaccatcgatatcctgataagggcaattctgctcgacaacaaacaccgcgcaacgcagttgtaataaggcataaagctgggaaaccgataattcagagtgatgcagatcttgccattcaatcataatgctctccttttagatgtatgccttatactagccggaatattttttgaaacgtgatgaactcatggaattaatttttttaggtacttcggccggtgtgccaacccgcacgcgcaatgtcacggcaatattgcttaacctgcaacatccgacccagagcggactttggttgtttgactgcggtgaaggcacccagcatcagctactgcataccgcctttaaccctggaaaactggacaagatttttatcagtcaccttcatggcgatcatctttttggtttacccggcttgctgtgcagtcgttctatgtcaggcattatccaacccttaacgatttatggtccgcaaggtatccgtgaatttgtggaaaccgcgctgcggattagcggctcatggaccgattatccgctggaaattgtcgaaattggcgctggcgaaattctcgatgatggcctgcgcaaagtaaccgcttatccgctggaacacccactggaatgttatggctatcgtattgaagaacatgataaaccgggtgcattaaatgcccaggcattaaaagctgctggcgtgccgcctggtccactgtttcaggaattaaaagcgggcaaaacaatcaccctggaagatggaaggcagattaacggcgcagattacttagctgctccagtgccaggtaaagcgctcgctattttcggcgataccggcccctgcgatgccgcacttgatctggctaaaggtgtcgatgtcatggtgcacgaagcgacgctggatataaccatggaagccaaagccaatagtcgcggccatagctctacacgccaggctgcgacactggcccgtgaggctggagtcggtatgctaatcattacccacgtcagctcgcgctatgatgacaaaggttgtcagcacctgttacgtgaatgcaggtcaattttcccggcgactgaactggcgaatgatttcaccgtgtttaacgtttaactctgcttattattaaaaacagggcgaaacttgccctgttatcgcaacccgcgctacatatatccacccacacgggcatattgagcgatttttgatatttattcatctcctcacgcactatattcagagcaataagttgcctctatttatcttgattcagcacaacctttgcaactaaaaggagcccatgatggttacagttgtcagcaattattgtcaattatctcaaaagcaactcagtcagacatttgcagaaaaatttactgtgaccgaggaattactgcagtctttaaaaaaaacagcgttatccggagatgaagaaagcattgagttactgcataatattgcgttaggttatgataaatttggaaaagaagctgaagacattctttaccatattgttagaaacccaacaaatgagaccctatcgattatccgacttatcaaaaatgcttgtttaaaattatataatttggcacataccgcaaccaacttcccccttaaaccaactggtccggataattcagatgttctcctgttcaaaaagctattctccccttcgaaattaatgacaattatcggtgatgaaattcctcttatatctgaaaaacagtcgctttcgaaggtgcttttaaatgatgagaataatgaactgagtgatggtacaaacttctgggataaaaatcgtcaattaaccacagatgaaatagattgctatcttcagaagatcgccgctaatgcaaaaaatactgaagtcaattatcctactggtctctacgtcccctactccaccagaactcacctggaagacgctctcaatgaaaatattaagagcgatccatcatggccgaaagcagtccagttattccccataaatactggcggacactggatattagtttcgctacagaaaatagtaaatgaaaaaaaataatacacaacaaataaaatgcgtcatattcaactcattgcgcgcactaggccatgataaagaaaattcacttaagcgtgtcattaatagttttaattctgaattcatgggagaaatgtcgaataataatataaaagttcatttaactgaacccgagataatatttttacatgccgatcttcagcaatatttaagccaaagttgcggtgcatttgtgtgcatggcagcccaggaagtgattgaacaaagggaaagcaattctgacagcgccccctatacgttattaaaaaactatgctgacagatttaaaaaatattcagcagaagagcagtacgaaattgattttcaacatagactggtaaacagaaattgttatttagataaatatggcgatgcacgaatcaatgcttcttatacacaattagaaataaaacactcacaacccaaaaatagagcatccggcaaaagagtgagttaacatcattgttaattaattcgaccagtcagcaaatatgctgactggtcgaacatagtttgctaaacagtcatcactgactgatgtcagtcacaccatccgccagttcaatcttcgggtatttccagcgtatctcggcacgcgattgctggtctgttgatgtagtggattgttgttgctgacttttcttaccctcagagttctgccccctgtcaactcaatctgccaataaataacataattatatttttccttatatgaattcctttttaaaatagcgaagccactgtaaaagatactttttgtatagatctaacaaccgtaataaaacaaacactcataactcattataaataatgataaaataacgtcttttattgataatttatatatgaaaaaaaatccttttgttatattatttctgatttcactccctctgattatttttaccaaccctgggtcactgcattatcgccaacgccccgacacgtcagtcctgagcaattagaaaaaacagttcgttatcttacacaaactgtgcatccacgtaatgccgacaatattgataatctgaataggtccgtagagtatataaaagagttctttgtcagtagcggtgccagagttaccgcgcagggcgtccccgattggctattacgactctgcgcctggtagccaggattacccttacccgcaatgtcctggctttatcccgatcggggggactttattgcctggtcggcagaatacaggatatcaacgccgttcgtcaggtaaaaacggcattgttatcatcccgggatttatctgtttattctatgaatgccccatggtttattcccggtattgatttctctgaccacctgaattattggcaacacgatattcccgccgtaatgattactgacaccgctttttatcgtaataaacaataccacttgcccggtgatacagcagacagattgaattatcagaaaatggctcagatggtgttataaccttgttacacaacagtaaataataaaaatttctcgaggcgggtccagaaacagcgacatgtacattttattttccctcgtctgttttaagatgcgaaacataaaattcaatggaggaaaaataaatgggaatgattggttattttgcagaaattgactcagaaaagattaaccaactgcttgagtctactgaaaaacctttgatggataatatacatgacacgctttcaggattacgccgactggatattgataaacgctgggattttttacactttgggctgacaggcacctctgcttttgatcccgcgaagaatgatccgctgagtcgtgccgtgcttggtgaacacagcctcgaagatggcatagatggcttcctgggattgacctggaatcaggaattagccgcgacaatcgaccgactggaatcactggatcgaagtgagctgcgtaaacagttttccattaagcgactcaatgaaatggagatttatccgggagtgaccttttcagaagagttagaggggcaactctttgcctcgatcatgcttgatatggaaaagctgattagcgcgtatcgacgtatgctgcgacaagggaatcatgcgctgacggttattgttgggtgatggtgtcagagcgccaaaaaaaaccgccgaacatgtcggcggctttctgacttacaaactaacagattacatcagcggcattgctaaccgcacaatactaatcagcggttgtggccatacacccagcaccagtaccaacagtgcagaaatcagcaccacgataccgcccgcgctgtactgccagtttgacggtgcatcgcgacccggttgttccggtgcgtgcaggtacaggctcaccgccacgcgcaggtagtagtagaggccgattgccgaaccgacaaccacggcacccaccagccaccacaagtgtgcctggacaccgaccgccagcacgtagaacttaccgataaagcccagcgtcatcgggataccggccagagacagcatcatcaccgtcatcactgccgcgaggatcggacgatgccagaacagaccgcggtaagagaacagggaatcagcatccgggccacgatacgggctggacatcaggctgaccacgccgaacgcgccgaggctgctgaacagataaccggccagataaacccctaccgcttccatcgacatctcgccggtttgcagcgcaatcagcgctaccagcagatagccgaggtgagagatagatgagtaaccgagcagacgtttgatattggtctggctcagcgccatcaggttaccgaagatgatagaggcaaaggcgataatcgccagcactacccgaatcgcttcgctgtcacccaccggtgcgtagaggaacagacgcatcaccacaccgaagatagcgattttgctcgccgtcgccaggaaagtggaaaccggcgcaggcgcgccctggtatacgtctggcgtccacaggtggaacggcaccagagagagtttgaagccaaggccaacaatcatcaggccgaaacctgccagcaacagcggctcgttgagcataccgtcgccgaggtttttacccagcgcgacaaacgacaggtcgccagactgcgcatacaccagcgccataccgaacagcaggaaagaagacgctgcggcagaaaggatagtgtatttgatactggcttccagcgaacgtttctggcggaaagcgtaaccgaccaggccaaacagcggcaaagagatcagttcgataccgaggaacagagacgccagatggttggcattcgccagcaggatcccgcccagcgcggcaattaacaccaacaggtagaactcatccttgttgtcgttatagccttcaagccacgggtaggcgaaagtacaggtggcgaggctcgccaacaataccagcccggtgtaaagcatggcgaaaccatcaacgcgcatcagcggcgtaacgtccatagcgcccgcctggccaacaaaccagagcgaaaccagcgccgcgttaagcccaataaccgagagcgtagcgttgaggaaatgattgcgtcgccacgcaatggagagcatcacaaccaccaccgtcaagccgacgatcagcaacggtagcagtgcgatcaggttttgtggagttattgtcatggcgatttacggccttgtagtagtaacggaattaacaaaccactgctggatattgccaatcgcggagtgcgaggtatccagaatcggctgcggatagaagcccagcagtaccagcagcaccaccagcaacaggatcataaacagctcacgcagcgacatccctggcagttcctggctggcaatctggcttttcgctttaccgaagtaagcgcgatgtaacatcgccagcgaataaacagatgcaaagaccagcccaaaggtagagataacggtaatcaccgggacaacctggaagctgccgaacagaatcataaattcgccgacgaagttaccggtgccaggcatcccaagcgttgccaccgcaaagaacagcgacagtgctggcagccatttcatcttgcgccacagaccgcccatcatgcgcatgtcgcgggtatggatacgttcataaagctgaccacaaagaataaacagacccgccgccgacaaaccgtgcgcaatcatctggattaccgcgccctggtaggccaactggctgccggtgtagatagcaatcagcacgaagcccatgtgggaaaccgaggtgtaggcgatcagacgtttgatatcggtctgggcgaaggccatccacgcaccgtagaagatgccgataacacccagccacatagcaattggcgcaaactctgccgatgcgttcgggaacagcggcagggagaaacgcagcaaaccgtaagcggcagttttcagcaagatccccgcgaggtcaacggaaccggcggtcggagcctgagagtgcgcatccggtagccagccatgcagcggaaccaccggcattttgactgcgaaggcgatgaagaagcccagcattaacaggtattccacaccactggacattggcgtattcagcagctcttcatagttgaaggtccagacgccggtcgcattgtagtgaacaaaaaccagcgccaggatggcaatcaacatcaccaggccactcgcctgggtgtaaatgaagaacttggttgccgccgtgatacgcgttttaccgtcagaggctttatgcccccacagtgcgatcaggaagtacatcggcaccagcatcatttcccagaagaagaagaacaggaacatgtcgatggcaaggaacacgccgataacgccgcccaggatccacatcaggttgaggtggaagaagccctgatatttttcgatctctttccacgaacatagtaccgccagcacaccgagcagaccggtcagcacaaccatcagcagcgacagaccgtcaatggcgagatgaatagagataccaaaacgcgggatccacggcatgtcgaattcagactgccactgcggaattccggcggattgcgtcagtgaataaccgccctgcaaccacagttgcagcgacagcgccagcgtcaatcccatggtgatcagcgcgatccagcgcggcaccttgacgccaaagcgttcggtctgccagcacaggaagccgccaataaagggaattaatattagccagggtagtaacatggcgatctttattccttgtaaaagtcccgtcaggaccggattttcaacgaattctcacgacagaaaattctcttcggactgggggtagtgtcggatgcgccgcgaaggcagcttatccgacctacgttcttatatgcccaggggcaatcccacaatccttaactcaacgcagtaccatcaacagtgccagcaccacgaccgcaccgatgctcatggatgccacataccagcgcagataaccgttctcgcttaacagcagacctttacctgcaaagcgggaaagaaccgccgggatgttcatcattgagttcagcggatcgcgtttcagcaaccaggcaatacccaggaacggcttgacgaacactttgtcgtacagccagtcaaagccccaggcgttgtaccaccaggtactcagcaggcggcccggcgcactgttggcgatggaggtcaccagagtacgtttacccagccacagccaggctgccagcagaatgccgaccaccgcgaccacgccagaggtaatttccagggtcaacatgctgccgtgcgccagttccgtcgtttgcggaagcacgccctgcagcggcggtacaatcagtgcgccaacgaaggtggaaaggatcagcagcacaatcagcggcaggctgtgagttacccctttcacggcgtgagcgtgaatttgttcttttccgtggaagacgatgaaaatcatacggaaggtgtagagcgaggtcataaacgcaccgaccagacctgccaccatcagattgatatgaccattcgccatcgcacccgcgaggatctcatccttactgaagaagcccgcagtgaccagcggcagtgccgacagtgctgcgccgcccaccaggaagcagagataaaccagcggaatagatttacgcagaccgcccatcttgaagatgttctgttcgtgatggcaggccagaatgacggaaccggatgccaggaacagcagcgctttaaagaacgcgtgagtcatcaagtggaaaatcgccgcatcccatgcctgcacgccaagcgcgaggaacatgtagccaatctggctcatggtagagtaagcgagaacacgtttgatgtcggtctgtaccagcgcggcaaaaccggccagcagcagcgtaaccgccccgacaatacccaccagatgcagaacttccggcgtcatcaggaacaggccgtgggtacgggcgatcaggtagacacccgcggttaccatcgttgcggcgtggatcagcgcggagacaggcgtcgggcccgccatcgcgtcagcaagccatgtctgcaacggcaactgcgcagatttaccgaccgcaccgcccagcagcatcagcgtcgcccacatcagcatgttattgccgtcagcaaagtgcgctggtgccagttccaccatttcgcggaagttcagggtgcccagttcgttgtaaagaatgaacagtgcgaaagcgaggaaaacgtcacccacacgggtcacgacgaacgctttcattgccgctgcgccattcttcggatcggtgtaatagaaaccgatcagcagataggagcacaggcccacgccttcccagccgaggtacatcagcagcaggttatcggcgagaaccagaactaccatgctggcgatgaacaggttggtgtaggcgaagaagcgagagtagccctcttcaccgcgcatgtaccaggaggcgtacatgtgaataaggaaacccacaccagtgaccaccgagagcatggtcagcgacaggccgtccagcaccaggttaaaaccgatgttaaagtcgcctaccgacatccacgtccacagcggctggctgtatgcctgctcgccgttagcgaagaaatcaacgccgataaaggcggttaccagcgccgccaggcccacagagccaacgccgacgatcgccgaaacgttttcagaccagcgcccacgggagaacgccagcaggacgaagccaatcaatggcaaaataatggttaaggcaagcatgttcatccgcgcatctcacttactgaatcgatgttcaggttctggcgacgacggtgaagttgcagcagcagcgcaaggccgatactcgcttctgccgccgcgaggctgatggcgagaatgtacatcacctgaccgtcggtctgaccccagtagcttccggcgaccacaaaggccagcgcggaggcgttaatcatgatttccagaccaatcagcataaacagcagattgcgacggataaccagaccggttaagccaagaacgaataagattgccgcgaggatcagtccatgttgtaaggggatcatgcgtgctcctccgtttttcttttcgcgctgtcgtctttacgattgctcagcacttcacccgcacgctcttcacgaccgacgtggaaggccacaaccagacccgcgagcagcagcatagaagccagttccaccgccagtacgtaaggcccgaacagcgtaatacccactgctttagcactgattggcgtaccgtcgataccctgatcattaacaccaaggatggcgtaaacaatcaccaccagcatgatggccgacaaaattgccggaccaatccacacctgcggtttcagccactggcgttcctgttcgatttctgaaccgcccaggttgagcatcatcaccacgaacacgaacagcaccataatggcacccgcgtagacgataatttccagcgcaccggcgaagtaagcgcccagtgagaagaacaccccggaaatcgccagcagcgaaataatcaggtacagcagtgcgtgtaccggattggtatgggtgatcactcgcaaggtcgcaagtatggctatcaggccacagatataaaaagcgaactccattgcccctctccttacggtaacaggctcttgacgtcgataggcttggcttcgttctctgcttcgcccttatctttgccgtcgattgccatacctgccatccggtagaagttatattccgggtatttgcccggaccggagatcagcagatcctctttctcgtaaaccagatcctggcgcttgtattcccccatttcgaaatccggggttaactgaatcgccgtggtcggacaggcttcttcgcacagaccacagaaaatgcagcgtgagaagttgatgcggaaaaattccgggtaccagcgaccgtctttggtttctgctttttgcagcgagatacagccgaccgggcaggctaccgcgcagaggttacaggctacgcaacgctcttcgccgtccgggtcgcgggtcagaacgatacgaccacgataacggggcggcagatagaccggctcttccgggtacattcgcgtttcgcgtttggcgaacgcgtgcaggccgatcatccagatactacgaacctgggtgccgaaacctactaacaattcttttaaggtcatggtcttattgccccttattgcgcctgccagagaatgacagccgccgttaccagcaagttgatcagcgtcagcggcaggcagattttccagccgaaggacattacctggtcataacgcggacgcggtaacgacgcacgaatcaaaatgaacatcatcataaagaacgcggttttcagcgcgaaccagatgaatggcggtaacaacgggccttgccagccaccgaagaacagcgtcaccatcaatgcagagatggtcacaatcccgatgtactcacccacgaagaacagaccgaacttcataccggaatattcaatgtggtaaccatccgccagttcctgctcggcttccggctggtcaaacgggtgacggtgacataccgccacgcccgcgatggcaaaggtaataaaaccaaagaattgcgggataacgttccacacatgcgcctggctgttgacgatgtcggtcatgttgaatgaaccggcctgcgccaccacgcccatcagggaaagcccgaggaacacttcgtagctcagggtctgcgcagaagcacgcatcgcacccagcaacgagtatttgttgttacttgaccagcccgcaaacagcaccgcgtaaaccgccagacctgccatcatcaggaagaacaaaatcccgatgttcaggtcggcaaccacccaacccggactgactggcacaatcgcaaaggccagcagcagcgaggtaaaggcaatcatcggtgccagggtaaagatgacgcgatccgagaatttcgggatccagtcttctttaaagaacattttgatcatgtccgcaaccagctggagcgaaccgccccagccaacacggttaggtccgtaacggttctggaacagacccagcaggcgacgttcgccaaagctcatgaatgccccgcaggtgacaaccaccagcaggatcaccaccgctttgaggatggtcagcaggatctcaatcagttccggtgatatccaactcattgttgtgcctccttgagatcctcaagatgcgcgccagccagcaccggagcaataccggacatacccatcggcaagcccacctgccctgccgtcagcccttcagcgatttcaaccggcagcgtgaccgtgttgccatcgtaactaaaggagacgtgtgtacctgcgttcacacctaacttcgcggcatccgctgggttgagtttgatgtacggctgcggcatacggctctggaagaccggagcacgctgtgacaattcatcgctgccaaacaggtggtaatacggcgcgatacgccatttcccgtcctgcggctggaagcgtgccggtacgctggtgaagtaatccagaccattttcgctggtttcaaacagacgcacgcccggatcgccaaagcgcagtttgccgcccacttcgtcctggaatttgttccacgcctgcggggagttccagcccggcgcccaggcaaacggcacttgcgaacggtgcgcagtcggctggttgttaccttccatcgagaaggtgaacatggtgtcaatatcctgcggctgacgcggctcatgaacgctgatattggcgcgcatggcggtacgaccgctgtaacggtgcggttcacgggccagtttctgcccacgaatacggaatgtcgcatccggcgcagcatctttgatacctgccagttccgggattttcgccacaacagcgtcaatcacatggtcgagctgcgtccagtccacttcacggctcagcagggtgctgtgcagcgagtgtaaccagcgccagctttccagcatgacagttttgctgtcgtaataagcaggatcgtaaacctggaagaaacgttgggcgcggccttcgttgttgatcaccgtaccgtcgctttcagcaaagctggcagcagaaagtaccagatgggcgttttccataatcgctgtgcgttgatgatcaaccaccatcaccagcggcgctttagccagcgcagcattcacgcgggtagcggaagcgtgacgatgcagatcgttttccagcaccaccaccgcgtcggcgcgtccggtttccagttcggtcaacgcttcttcaagcgaaccgccacccataatgcccagccccatgctgttgacggaacgggcaatcatggtgataccaacgtcagcgccgcgacctttcagggctttcgcgacgttagccgcagcctgaatcacctctatgctaccggcgttcgtcccggagataatcaacggtttcttcgcacctgccagtgcctgcacgatgacgtcgattttgctttgcagctcaggttcgataccgtcaaccgctggcgcagagttatccagcgcatgggcgatggcaaaacctaaacgcgcctgatcttcaaccggtgcgcggtaagtccacgccgcgatatcatccagacgggtgtcatcaacgttggtaacaaacagcggatgcttcgcacgttgaccgatgttgaggattgccgcaatctgccagtcagccactttctgtgctgccgccatttcgcgcgctttacctttcacagcctgacgcactgccagcgcgacgcgcgcgccggtctgggtaacgtcttcgcccagcaccagtaccgcatcgtaagattcgatttcgcgcagagccggagtataaatgccgccttcacgcagcactttcagcgccagttgcagacgttcctgctcaccgtgagcgataccggtgtagaagttttcttcgcccaccagttcacgcagcgcaaagttgctttccacgctggcacgcggagaaccaataccgatcactttcttcgactgacgcagaatatctgccgcgccctgcattgcctgttcggcgttgagggtaatgaaatcatcgccacgacgctgtactggttgacgcggacgatctttcaggttgacgtaaccgtaaccgaaacgaccacggtcgcagaggaagtagtggtttaccgtaccgttgtaacggttttcgatacgacgcagttcgccgtaacgttcaccggggctgatgttacagccgatggaacattgctggcagatgctcggcgcaaactgcatatcccatttacggttgtaacgctcggagtgcgttttgtcggtaaatacgccggtcgggcaaatttcgaccaggttaccggaaaattcgctttccagcgtgccgtcttccgggcgaccgaagtagacgttgtcgtgcgcaccgtaaacgcccagatctgtaccgtcagcgtaatctttgtagtaacgcacacagcggtagcaggcgatgcagcggttcatttcgtgagagatgaatggccccaaatcctgattacggtgggtacgtttggtgaaacggtagcgacggaagctgtgtccggtcatcacagtcatatcctgaagatggcagttaccgccctcttcacataccggacagtcgtgcgggtggttggtcatcaaccactcgaccacgctttcacggaactgtttcgcttcttcgtcgtcaatggaaataaaggtgccatcggaagccggtgtcatacaggacatcaccaggcgaccacgcgtgtcttccgcgttttggtattgcttcaccgcacactggcggcaagcaccgacgcttcccagcgccggatgccagcaaaagtaaggaatatcaaggcccagagacagacaagcttccagcaggttgtccgctccgttgacctcgtattctttgccgtctacatgaattgtagccattagcatgcttccagttttctcggtcagggaccgagcgttaatcgaaattcggttaccagcgctctttcagcaggttcggctgaatcccattaatcaaatgggtattgctgaacggctgtttgattcccgcctcaaattcttcgcggaaatatttgatggcgctctgtaacggctccactgcaccaggtgcgtgggcacagaaagttttacccgggcctaagaatcgacacagttgctcaagtgtttcgatatcgcccggctgaccttcaccacgctccagcgcacgcagaattttcacgctccacggcagaccgtcgcggcacggcgtacaccagccgcaggactcacgggcgaaaaactcttccaggttacgcaccagcgacaccatgttgatctcatggtcaaccgccatcgccagcgccgtacccagacggcttcccgctttaccgatactttcgaattccatcggcaggtcaaggtgcgcttcggtcaggaagtcggtgcccgcgccgcctggctgccaggctttgaatttcagaccgtcacgcataccaccggcgtaatcttcgaggatctcgcgcgcggtagtaccaaacggcagttcccacagtcccggatttttcacccgaccggagaagcccatcagcttggtgccagcatctttacttttcgagatgttctgataccactccacgccgttagcgaggatcgccggaacgttacacagggtttcgacgttgttgacacaggtcggtttgccccatacgccggaggttgccgggaaggggggtttcgagcgtgggttagcacgacgcccttccagggagttgattaacgctgtttcttccccgcagatgtagcgccctgccccggtatggacgaacagttcgaagtcgaaacctgttcccataatgtttttgccaagcaagcccgcttcagtggcttcggcaatggcgcggcgcagatttactgccgcttcgatatattcgccacgcaggaagatgtagccacggtaagctttcagcgcaaacgcggagatgagcataccttccaccagcaggtgcggcagttgctccatcagcaggcggtctttataggtgcctggctccatttcatcggcgttacacagcaggtaacggatgttcatggattcgtctttcggcatcaggctccatttcaggccggtagaaaagcccgcgccaccgcgccctttcagaccagcgtcttttacctgattaacgatttcgtccggagacagcccggtcagcgccttacgcgcgccttcgtaaccgtttttgctgcgatattcgtccagccacactggctgtttgtcatcgcgcagacgccaggtcagcggatgcgtttcgggagtacggataatgtttttcatttataccgctccagcagttcagggatcgcttccggggtcagatgcgcgtgagtatcctcatcgatcatcatgtttggccctttatcacagttccccaggcagcaagttggcagcagcgtaaagcgaccgtcaaatgtcgtttgccctggtttgatgtttagctttttctcgagcgccgcctgaataccctggtaaccgttgatatgacagaccacgctgtcgcaataacggatcacatggcggccaaccggctggcggaagatctggctgtagaacgttgccacaccttcgacgtcgcttgccggaatacccagcacatcggcgatcgcgtggatcgcaccatccggcacccagccacgctgcttctgaacgattttcagcgcttcaatggacgccgcacgcgggtcttcgtagtggtgcatctcgtgctcaatcgcttcacgctctgccgcactcagctcaaaagcctcggtttgtggttgttgattctcgtgcataattagcggtccacatctgacataacaaaatcgatactgcccagataaacaatcaggtcagacaccaggctgccgcggatcgccgccggaatttgctgcaaatgcgcataactcggcgtgcggatacgagtgcgataactcatggtgctaccgtcgctggtcaggtagtaactgttgatccccttggtcgcctcaatcatctggaaagattcattggcaggcatcaccggcccccacgacacttgcaggaagtgggtgatcagggtttcgatatgttgcagcgtgcgctctttcggcggcggcgtggtcagcgggtgatccgctttgaacgggccttccggcatgttgttgaggcactgctcaagaatgcgcagactctggcgcagctcttccactttcagcattacgcgggtgtagcagtcagaaacaccaccaccaaccgggatttcaaagtcgaagttttcatagccagaataaggacgcgccttacgcacgtcgaagtcgatcccggtagcacgcaggcccgcgccagtggtgccccactccagcgcctctttcgcgccataggcggcaacgccctgggaacgacctttcagaatggtattttgcagcgccgctttctcgtaagacgccagacgtttcggcatccagtcgaggaactcacgcagcaggcgatcccagccgcgcggcaggtcgtgcgctacgccgccaatacggaaccacgccgggtgcatacggaaacccgtgatcgcttccaccagatcgtaaattttctgacgatcggtaaaggcgaagaacacgggcgtcattgcgccgacgtcctgaataaaggtcgagatgtacagcaggtggctgttgatacggaacagttcggagagcataacgcgaatgacgttaacgcgatccggcacggtgatcccggccagtttctctaccgccagcacgtaaggcatttcgttaacgcagccgccgaggtattcaatacggtcggtatacggaatgtagctgtgccaggactggcgctcgcccattttctccgcaccacggtggtggtagccgatgtctggtacgcagtcgacaatctcttcgccgtcgagttgtaaaacgatacggaaagccccgtgcgccgacgggtggttcggaccgaggttgaggaacatgaagtcctcgttttcggtgccgcgcttcatcccccactcttccggtttgaaggtcagggcttccatctccagatcctgtttggctttggtcagctcaaacggcgagaattcggtagcgcgcgccgggtaatctttacgcagcgggtgacctttccaggtttgcggcatcatgatgcggcgcaggttcgggtgaccgtcgaaagtaatgccaaacagatcccaggtttcacgctcataccagttagcgttcgggaacagtttggtgaaggtcggtacgtgcaggtcgttttctgccagcgccaccttcagcatgatgtcgcggttacgatcgatagaaatcagatggtagaaaacggaaaaatccgcggcaggtaacccttcgcggtgtgtgcgcagacgttcgtccatgccgtgtaagtcaaacagcatgacgtaaggtttcggcagtttctttaagaaatcgccaacttccagtaattgttcacgcttgatccacacaacgggaaccccggtgcgagtcgcctgaacagtaaaggcatccggcccaaaacggttgcgcagttcgccaatcaccggatcatcaagatgatcgcgggtctgccaggcgggttcttgcgcggttaagtcggtcatattgttcaccattgcaaatggtccgtggtgactgtcggcgcagtaagcttcgcgaaatagatttaggaataagcgaagaaaaatccctttgccgacaggcgcaaattaaatctcgtcaggtgtacgcaggttggttacggcaatgcgttcaccgcgcttgcgttcgcgctctgattgcatattggcgcgataaacgccctgatcgccaaccacccaggagagcggacgacgttctttgccgatagattcctgcaacagcatcagtgcctgcatgtacgcttcaggacgcggcggcagcccgggatatacacatcaaccgggatgaatttatcgacgccctgcacaacggaataaatatcgtacataccaccagagttggcacaggcacccattgagataacccattttggttccagcatctggtcatacagacgctgaataaccggtgccattttggtaaagcaggttcctgcaaccaccatcaggtcagcctgacgcggcgaagcacgcaatacttctgcgccaaaacgcgccacgtcatgcaccgcggtaaacgaagtcaccatctcaacgtaacagcaggaaagaccgaagttatacggccaaattgagtttttacgaccccagttaaccatgtcattgagcttgcccataaacacgtttttgttaacttcttgctccagagggtcggttacgatctcctgcttttgcagggggtaacggtcgttctcaccgttgggatctatgcgggtgagcgtataatccatcttaatgcctcgcggttagcgttgacgattagcgatactgttcgtttccgggttcatacgctcgcggcgtgaacgcgcgggcgtccagtccagcgcgccaatacgcaccagataaaccagacctgccagtaacacaaaaataaaaattgcagcttccacaaagcctacccagccgctttcgcggatagaggttgaccatgcgaacagatacagcgcttcaacgtcgaagataacgaagaacatggccaccagataaaacttggcggacaggcgtaagcgggcggagccgaccgagtcgataccggattcaaacggcacgtttttcgacctcgcgcgtgcgcgaccgcctaaaaaccaaccgcctaccagcatcaggcaacacaggccaatggcaacgataagaaagatagcgaatgcccagtgatgagcgatgacttcagtggatgttgacatactcattgcttactcatcaaaagtagcgccagattcactgctcttcacggcagatggacgccacatcgattcatggggaggaataaaaaaaaccttacaatcactgtagaaattcttttatacagctaattgatgtggtcttttactcctttctataaccttttgtcaactttaacaaaagtttcttcacattagtttacataatatcaacaccattagcatttaatgccctttcaccccagatccttgacgactccaggataattagatgttgttgaatcgtgtccgttgtgaagcaatggaaaaaatacgggtctattttgacaggaatttgtgtcgattcctccccccaaaagagagtattttcttgatctgtgacacgcttttgtcattccataacaaaaacgcagcaacaaatttacgtattttttaacatcattgtagcaggtgatttttttcaggcgattatttgtgcgttcgggacgtgaatctctggtgattgaaaaatgaacagttttgtacgttctgcactatgcgaggaaggatttttactaaaaaaaagccgctggggtttaaaacacccccagcggctcgttttttacactattgtctcaggaattatctatcgtccgtcgattactcgatatccctttcaatcaacaatgaatcatccccttccggagcagacattgggctgtattgccacggattatggtagctctccatcgcctgatagatcacctgggccagctcattattactggacgggtcatagcacagcaaatattcggtatcaggtagcggcggtaagccatctactccactcagcacacgcaggtccgggctcatcatctcaaccggccttgccgtcacgccaagaccggctttcactgccgcacgaacggccggaagcgtcgaggcgacataagccagtcgccatggaatatctgctttattaagcgtcgccagcaccatatcgcgaaacggacttggatcatccagcaatacaagagggatcggctcgcctttttgcaatacgtattccgctgcgcagtaccagtgtgttggcgaggttcgcaggttcaatgccttaaacgctgaaggacgatgggtggttaccatcaaatccacttcctgggattccagcatttctgccatataggcattacgtttaacgcggacatccagcgctaatttcggataaaccgaactcacgcgatttaacaggaaaggtaagatcgtatcggcagattcatctgaagcaccgatagttaacacgccctgaagattactgaacattaatgatgagcaggcctcatcattaaaacgcaggattttcctggcgtaaccaagaagttgaatgccatgttcagttaacagtttgttgcgaccgtgacgagcgaacagttctttcccaacgagttgttccagacgctgcatttgctgacttacggcggactgagtacgacacacagcggcagctgcggcagcaaaagtgttcagatcggcaacagcaacaaatgttctcagcagatcgaggtcgaggttaattatcggacgatttgcacttatcatatattatcacttactggcggctcatactgagctggttaatgctgtgcacacacaaacaagcaattccatttgtaatgtgcctccctggcagtttcatccggaactcggacgaaagtaaaaatgcatatgagttgcactaaaaaagcgactcacattgttccgttataatgcctgaagtagatcacagaatatatcttcagggatcgcatatctattaagttactcactcttttctatttatgacatgcgcgtgtttgtataaatgtaaatgtgagtccttgttccactctcgtgcagcatcgctggtcatacgcgaacacgtacaaacagcaatggtgaggcggcatcaagagcagggatccgtcatttatgcgagcattttaccccaaaaaccttttatttataagggtcattgcgaattatctgatgcaaagttatgttatgttaggcaaagtaatcttctattattaataagcacatcaaaacctttttgaatattaaataataattaattagcatcatcctcattcattaattccgcttaacaatagtttcacaccttgcccccattacgacacctcggaaatcatcacgctgttaaactctccgtaatgcggaaatatcatcatcgcgtttcattagtgaattcttaaatgaggcattttcacacaattatcttacagataaaaaaaccagacttacaattaagaatcagaacaattcactatataacattgcatgtaaagcatatacacctcattattttgtcattattaagttattaacagcacaatcgagccttcccctctggcaaaatcttattctgcagaccttcaaaacaccgtcctgggggagtacattgttctaagctgacttccacggcagggagtggcgataacagcaaaaaaggtcaagattcatgtcccccattgaaaaatccagcaaattagagaatgtctgttatgacatccgtggtccggtgctgaaagaagcaaaacgcctggaagaagaaggtaacaaggtactgaaactgaacatcggcaacccagccccgttcggttttgacgcgccagatgaaatcctcgttgacgtgatacgcaacctgcctaccgctcaagggtattgcgattccaaaggtctttactccgcgcgtaaagccatcatgcagcactaccaggctcgtggcatgcgtgatgttaccgtggaagatatttacatcggcaatggtgtatcggagcttatcgttcaggcaatgcaggcattgctgaacagcggggacgaaatgttggttcctgcaccagattacccactatggaccgcggcggtttcgctttccagcggtaaagcggtgcattatctttgcgatgaatcctctgactggttcccggacctcgatgatattcgcgctaaaattacgcctcgtacgcgtgggatcgttattatcaacccaaataacccaaccggcgcggtatattccaaagagcttttaatggagattgtggagattgcacgtcagcataatctcattatcttcgccgatgaaatttatgacaaaattctttacgacgacgctgagcatcactcaattgcgccgctggcacctgacctgctgaccattacctttaacggactgtcgaaaacgtaccgcgttgcaggcttccgtcaggggtggatggtgttgaacgggccgaaaaaacacgccaaaggctacatcgaaggtctggaaatgctggcttcaatgcgcctgtgtgctaacgttcctgcgcaacacgccattcagaccgcgctgggtggttatcagagcatcagtgaatttattacccctggcggtcgtctttatgagcagcgtaaccgcgcgtgggaactgatcaacgatattccgggcgtttcctgcgtgaaacctcgtggtgcgctgtatatgttcccgaaaatcgacgccaaacgctttaacattcacgacgatcagaaaatggtgctggatttcctgttgcaggaaaaagttctgttggtgcaagggacggcattcaactggccgtggccggatcacttccgcattgtcacgctaccgcgtgtcgatgatatcgagctgtctttgagcaagttcgcgcgtttcctttctggttatcatcagctgtaatcttaatttcactgccggagattgcatccggcagcgttatcccgccacaatgacctgatgatgtcatcatacgtaaggtcactatgaaacagagccatttttttgcccatctctcccgcctgaaactcattaaccgctggccgctaatgcgcaacgtgcggacggaaaatgtatccgaacacagtttgcaggtagcgatggtcgcccatgcgctggcagctatcaaaaatcgtaaatttggcggtaatgtcaacgccgaacgtatcgctttactggcgatgtaccacgatgcctcagaagtgctcaccggcgatctccctactccggtgaaatacttcaattcgcaaatcgctcaggaatacaaggctattgaaaaaatcgctcagcaaaaactggtcgatatggttccggaagagctgcgggatatctttgcgccgttaattgacgagcatgcatatagcgatgaagaaaaatcgctggtgaaacaggcagatgcactgtgtgcatatctgaaatgtctggaagaactcgcggccggaaataatgaattcttgctggcaaaaacgcgactggaagcgacgcttgaggcgcgtcgcagccaggagatggactacttcatggaagtatttgttcccagcttccatctttcgctcgatgagattagccaggattcaccgctgtaagcagccggagtctgcgtcgcatcaggcaataagcgccggatgcgacatcaggctcttgtcaaaacggaaacagcatcgggatcatcaccacacaaaccgccatcacgataatggtgaacggtacccccaacttcacaaagtcactgaagctgtaatttcccggacctaaaaccagtgtgttaacaggtgaagaaaccggtgtcataaaggcggcggatgctgccatcgccacgaccatcgcgaatggataaggcgacacccccatcgttttggcagcagccagcgcaatcggagccatcaacaccgccgtcgcggtattagagataaatagcccaataaccgccgacaagacaaacaaacaccccagcatcatatgtggcccgtaaccaccgccaatgtccatcagccctttcaccgccagcgcgacacctcccgttttctgtaatgccacagcaaacggcatcatcccaacgatcaaaataatgctcggccagtgaatggatttataggcgctttcagcatctatacagcggaatttccccatcagcaggcaggcgatgatagcggcaacaggattaggaatttcatctgtcagcattaacgccaccattagcaccagacagaaaatggcatggggtgcctggctgtgcgcgggcgatgcttcactcacctcttccggtaagttcagcgctacgaagtcgcggccctgtttggccagcataccgatcagtttccagttacccacaaccaggatgatatcgcccagcagcagaggctcatccgccagcgaaccttccagcgccacgccattgcgctttagccccaccacattcagtccgtagcgggtacgaaaaccaatttcgcgcaccgatttaccaatcagttctgactcaggaattaatgaaatctctgccatgcccacatcaagggcctggtcagaaaaatactcgccgcgcagtaccatcggctccagcaattgctcactacaaaattgccggagatcgacatcagccgcagacatatcaataagcaaaacgtcacgcgcgcgaaattcagaaaccccattaacgttcacgataacgcgacgaaaacgccgccagcgttcaacaccgatgacgttagcgccataacgctcacgtaatttgagatcatccagccgttgaccaatcattggcgatccggggcgaatagccagacgtcgcgcacgcccggtcagtcgatattcacggataagatcgcgaaaggttcgacgcgtccagccttcgcgctgcggggtctgggtatcccctttcagcatgaaacgcatcactaacatatacaaaatacccagcaccagcacgaccaggccaataggtgttacgctaaagaaactgaagccgtgatagccttcacgcagcaattcactgttgactaccaggttcggcggcgtcgccaccagcgtcatcatgccgctaatcagcccggcaaaactcaacggcatcatcaggcgcgacggcgaagtttgcatacgcatggcaacgcttaacaccacgggaataaagatagcgacaacgccggttgaactcataaacgcgccaagccccgcgacggtcagcatcaacaaaaccaacattttgatttcactgttgcccgcaactttgaccagccatgttcccattacggtggcaacaccggtacggaccaaaccatcgccaataataaacaaggcggcaatcaggacaacgttaggatcagaaaagccggaaaatacttcggggactgtcagcgttccgcttaaggcaaacgcgacaataacaaacaaagcgaccgcatccatacgcactctgcccgtcgcaaacaagacgatggcaacggccagtaatgaaagaacccaaatcaattcaccgttcacaacttatccttgttaattgagggggatgacttgattctgccataaaaaagccccgacgagacggggctaaatcatgatcaggtgtttcactgaataataacatcgccatttggctgtttggtcacagtaatttgctccagactgtggaggaccaaatcgacctcattcaggcgcggggtatctgccggagcgttaaccgcaatgacatggcaacccgccgccaggccagaaagcacgccagcgggagcatcttccaccaccacacactcctgcggcgcaagccccagcagctgcgcgcctaacagatacgcatcaggttctggttttccgcgcttcactcgctcagcggttacaaacacctctggtgcgggaagcccagctattttatggcgcgctcgcgctaccggcatggagccagaagtcacaatggcccacggaatacctgctttattcaaatgattgagtaaggcgattgcccccggaagcgcggtaataccttcggtttccgtggcctcgatttgctccagacgcgtaaactcggcggcaatatcagcctcggatttgcccgccataaaatggcgcagagaggtgatcgcctgtttaccgtgaatgaaagccagcacctcttccggcgctaacccatgacgtctggcccagttgctccacgcccgttctaccgcaggcagggaatccaccagcgttccatcaagatcaaacagaaaacctttgcaccgcacgcgggcctcctcaggcgttgataatttgattaatttcgttggcgctcaaatggtactgacgcgggcaggcatgccacacattaagcatgcgctgatatttttcccacattggcgtctgggcgttaaaaccgtgagttccggcgtcaaaatgggtatagcgcccttccacattaaccataaagcggacataaccgaggtaacgtgcttcagtggcggcgtcaaagccgaggaaggtgacacgacgttcatcgatggattgctggtcctgcaaattagaccaggaaacatgcaacgcatgatacatctccataatgtcgatgatagtgcggcaggtttcttctttcagctcgccaaactcgcgatccaattcacgcatctgtaatccgtaaccacgctcaataattgtttgcaggcgacggtaacgttcagcatttgccggatcgagcatagtcatcatcttgtactgattagacaaaataagacgttgcgcgttggtcatttccattgttgactcctgtatcactctactacggtgaaaaaaaagaaggctgagtatgccttcttttatatgcgtaatcaggggtcaattacaaatcatcaaggaaagttttatccagttgtttgaaggcgcgcttaagcgtgtcagctaatgcctggtaatcaggcttgccttcaacgggtgccaacacctgtccagactcctgcaatttaccgcgaacttcataaaaccagttgaggatagcagggggtaatggcgttacagaacgcttgcccagccaccataatccctgcatgggtaaacttaaggcgaacagcgcagtggcaactgccggcccaagctgaccgcccagggcaatctgccagcagagagtaaatacggcgatcggcggcataaaacggatcgcataacgcgtcatcttgataacgcgattttcgacaaagaccggggcaaggcgtttttccagcggccacgtctttgagtaatgctgtccccggcgaaacaagctaaaaaaattaacagaacgattatccggcgttgacatgcttcacctcaacttcacatataaagattcaaaaatttgtgcaaattcacaactcagcgggacaacgttcaaaacattttgtcttccatacccactatcaggtatcctttagcagcctgaaggcctaagtagtacatattcattgagtcgtcaaattcatatacattatgccattggctgaaaattacgcaaaatggcatagactcaagatatttcttccatcatgcaaaaaaatttgcagtgcatgatgttaatcataaatgtcggtgtcatcatgcgctacgctctatggctccctgacgtttttttagccacgtatcaattataggtacttccatgtcgagtaagttagtactggttctgaactgcggtagttcttcactgaaatttgccatcatcgatgcagtaaatggtgaagagtacctttctggtttagccgaatgtttccacctgcccgaagcacgtatcaaatggaaaatggacggcaataaacaggaagcggctttaggtgcaggcgccgctcacagcgaagcgctcaactttatcgttaatactattctggcacaaaaaccagaactgtctgcgcagctgactgctatcggtcaccgtatcgtacacggcggcgaaaagtataccagctccgtagtgatcgatgagtctgttattcagggtatcaaagatgcagcttcttttgcaccgctgcacaacccggctcacctgatcggtatcgaagaagctctgaaatctttcccacagctgaaagacaaaaacgttgctgtatttgacaccgcgttccaccagactatgccggaagagtcttacctctacgccctgccgtacaacctgtacaaagagcacggcatccgtcgttacggcgcgcacggcaccagccacttctatgtaacccaggaagcggcaaaaatgctgaacaaaccggtagaagaactgaacatcatcacctgccacctgggcaacggtggttccgtttctgctatccgcaacggtaaatgcgttgacacctctatgggcctgaccccgctggaaggtctggtcatgggtacccgttctggtgatatcgatccggcgatcatcttccacctgcacgacaccctgggcatgagcgttgacgcaatcaacaaactgctgaccaaagagtctggcctgctgggtctgaccgaagtgaccagcgactgccgctatgttgaagacaactacgcgacgaaagaagacgcgaagcgcgcaatggacgtttactgccaccgcctggcgaaatacatcggtgcctacactgcgctgatggatggtcgtctggacgctgttgtattcactggtggtatcggtgaaaatgccgcgatggttcgtgaactgtctctgggcaaactgggcgtgctgggctttgaagttgatcatgaacgcaacctggctgcacgtttcggcaaatctggtttcatcaacaaagaaggtacccgtcctgcggtggttatcccaaccaacgaagaactggttatcgcgcaagacgcgagccgcctgactgcctgatttcacaccgccagctcagctggcggtgctgttttgtaacccgccaaatcggcggtaacgaaagaggataaaccgtgtcccgtattattatgctgatccctaccggaaccagcgtcggtctgaccagcgtcagccttggcgtgatccgtgcaatggaacgcaaaggcgttcgtctgagcgttttcaaacctatcgctcagccgcgtaccggtggcgatgcgcccgatcagactacgactatcgtgcgtgcgaactcttccaccacgacggccgctgaaccgctgaaaatgagctacgttgaaggtctgctttccagcaatcagaaagatgtgctgatggaagagatcgtcgcaaactaccacgctaacaccaaagacgctgaagtcgttctggttgaaggtctggtcccgacacgtaagcaccagtttgcccagtctctgaactacgaaatcgctaaaacgctgaatgcggaaatcgtcttcgttatgtctcagggcactgacaccccggaacagctgaaagagcgtatcgaactgacccgcaacagcttcggcggtgccaaaaacaccaacatcaccggcgttatcgttaacaaactgaacgcaccggttgatgaacagggtcgtactcgcccggatctgtccgagattttcgacgactcttccaaagctaaagtaaacaatgttgatccggcgaagctgcaagaatccagcccgctgccggttctcggcgctgtgccgtggagctttgacctgatcgcgactcgtgcgatcgatatggctcgccacctgaatgcgaccatcatcaacgaaggcgacatcaatactcgccgcgttaaatccgtcactttctgcgcacgcagcattccgcacatgctggagcacttccgtgccggttctctgctggtgacttccgcagaccgtcctgacgtgctggtggccgcttgcctggcagccatgaacggtgtagaaatcggtgccctgctgctgactggcggctacgaaatggacgcgcgcatttctaaactgtgcgaacgtgctttcgctaccggcctgccggtatttatggtgaacaccaacacctggcagacctctctgagcctgcagagcttcaacctggaagttccggttgacgatcacgaacgtatcgagaaagttcaggaatacgttgctaactacatcaacgctgactggatcgaatctctgactgccacttctgagcgcagccgtcgtctgtctccgcctgcgttccgttatcagctgactgaacttgcgcgcaaagcgggcaaacgtatcgtactgccggaaggtgacgaaccgcgtaccgttaaagcagccgctatctgtgctgaacgtggtatcgcaacttgcgtactgctgggtaatccggcagagatcaaccgtgttgcagcgtctcagggtgtagaactgggtgcagggattgaaatcgttgatccagaagtggttcgcgaaagctatgttggtcgtctggtcgaactgcgtaagaacaaaggcatgaccgaaaccgttgcccgcgaacagctggaagacaacgtggtgctcggtacgctgatgctggaacaggatgaagttgatggtctggtttccggtgctgttcacactaccgcaaacaccatccgtccgccgctgcagctgatcaaaactgcaccgggcagctccctggtatcttccgtgttcttcatgctgctgccggaacaggtttacgtttacggtgactgtgcgatcaacccggatccgaccgctgaacagctggcagaaatcgcgattcagtccgctgattccgctgcggccttcggtatcgaaccgcgcgttgctatgctctcctactccaccggtacttctggtgcaggtagcgacgtagaaaaagttcgcgaagcaactcgtctggcgcaggaaaaacgtcctgacctgatgatcgacggtccgctgcagtacgacgctgcggtaatggctgacgttgcgaaatccaaagcgccgaactctccggttgcaggtcgcgctaccgtgttcatcttcccggatctgaacaccggtaacaccacctacaaagcggtacagcgttctgccgacctgatctccatcgggccgatgctgcagggtatgcgcaagccggttaacgacctgtcccgtggcgcactggttgacgatatcgtctacaccatcgcgctgactgcgattcagtctgcacagcagcagtaatctcgtcatcatccgcagctttgcgctgcggatatctgaaccggaaataatcactatttccggttttttattctcttaatctgcattaatcctttctgattatcttgcttaactgcgctacatcaatgaattgcgccatttcactttgcatacttaccactttgttttgtgcaagggaatatttgcgctatgtccgcaatcactgaatccaaaccaacaagaagatgggcaatgcccgatacgttggtgattatcttttttgttgctattttaaccagccttgccacctgggtagttccggtggggatgtttgacagtcaggaagtgcagtatcaggttgatggtcaaacaaaacacgcaaagtcgtagatccacactcatttcgcattctgactaacgaagcaggcgaacctgagtatcaccgcgtacagctgttcacgacgggcgatgaacgcccgggcctgatgaacttcccgtttgaaggattaacctcaggatcgaaatacgggacagctgttggcatcatcatgtttatgctggtgattggcggcgcgtttggcattgtgatgcgtacaggaaccattgataacggtatcctggcgcttattcgccatacccgcgggaatgaaattctctttattcctgcgctgtttattctgttttcacttggcggcgcggtatttggtatgggagaagaggccgtcgcctttgccattatcatcgcaccgctaatggtccggctgggctatgacagtattaccaccgtcctggtgacctatattgccacgcaaatcggttttgccagttcgtggatgaacccgttttgtgtggtcgttgctcaggggattgccggcgttccggtgctttctggctccgggttgcgcatcgtggtgtgggttatcaccactatgattggcctgatctttaccatggtgtacgcctcacgagtgaaaaagaatcctcttctgtcacgcgtgcatgagtccgaccgcttctttcgtgaaaagcaggcggatgttgaacaacgtccgtttacctttggtgactggctggtattgattgtcctgaccgccgtaatggtctgggtgatttggggcgtgatcgttaatgcctggtttattccagaaattgccagccagttcttcaccatgggtctggtgattggcatcatcggcgttgttttccgccttaacggcatgacggttaataccatggcttcatcctttaccgaaggggcgcgaatgatgatcgcccctgccctgctggtgggtttcgccaaagggattttgcagctggtcggtaatggtgaagcgggtgatgccagcgtgttaaataccatcctcaacagcattgccaatgccattagcggtctggacaacgcggtcgcggcctggtttatgttgctcttccaggcggtatttaatttcttcgtgacgtccggttctggtcaggcggcgttaaccatgccgttactggcaccgcttggcgatctggtcggtgttaaccgtcaggttaccgtgctggcattccagtttggtgatggcttcagtcacatcatttacccaacctcagcttcgttaatggcaactctcggtgtgtgcagggtggacttccgtaactggctgaaggtgggcgcgaccctacttggactgctgtttattatgtccagcgtcgtagtgatcggcgctcagttgatgggctaccactaaaaatgttaagagccgcaattgcggctcttttttcattctgccgtttcagtctctacggcttcatttttggcattgcgcttcatccacaacgccagcgctttcagcgagtctggagtgaactcatcgcagcgtgcggtgatttcttccggcgtcagccagcaaacttcactgacttcatcttcctgtagggcgaagggaccgtgagagacgcagctgaacaacgcgccccagacacggcaatttttatcttcgaaatagaactgcccgtgctcggcaaaggggacaccggcaatgcccaactcttcttccgcttcgcgacgcgcggattccagcagttgctcatcggcctgaaccacaccgcctgcggtcgcatctaacatgccgggtaaaaagtcttttgtctcggtacgacgctggaccagaattttgcccatgccatcatgcacgacgatgtaagttgcacgatgacgcagacactgtgcccgcatttgttcccggctggcttgtgcaatgacttcgttctcttcattgacaatatccacccattcagtacttgccaaacgacgctgttccattatcaggaaaccttctttttctggcgctcttacggcgcattttgagttgtgggtaaattacggattaatcgcgacctgcgcaatgatactttgatcattgagtgcgattacactaagtacgtcattatccagcatgccataactcgccggattaccgcctttcagaatactcaccgagccggggttgaaatggaaaatctccccccgctgttctgccactggcagatgggtatgaccgtacaccagcacatcgttctggtttaaagcaggtagattttccgggccaaaaagatgaccatgcgtcaaaaacagacgttgtttttccagtaatacctgttgccacggcgcggttatcgggaaatgcagcagcatttgatccacttcgctgtcgcagttgccgcgcacagcgataaccttatgtgccacttcattaagccgttcagcgactttggctggcgcgtaaccctccggtaaagcattacgcgggccgtgattcaacacgtcgccaaggatcaccagccactgggcaccgctttgggcaaacaactccagaacacgttccgtcgccggtaacgacccatgaatgtccgatgcaaacatcagtttcatcactcactcctcgtcgaaaaacgtaagctatgatactggattctgtcgttgctatcagccagattgcttcgccgaaagtgcaataaaacgctggacagacgctcgctgccactggaatgtcgcataatccaccaggcgttctggcacctcatcgccatgtagtaccaggcggttaatcattagcgccagatcagtatcagcaatgcaccattcaccaaataaattcggctgacccagtactaacaaatgttctgccatcgcaaacagtttctctgcactggcttttccctcggccgttagtggcgcttttttcgcccccgcaaagacaacatccgtcggacgctcttcgcggatgggcatcagatcgctgcgcagccaggcctgaatctgtcgtgcacgcgcacgattttctaaatcaagcggataaatacgttcccaggtcggtggcgcaaatcgatcttccagatactccgcaatggcagaagattcactcaactcaaaatcatcgatttgtaataacggcacacggcgtgtctgaccgtaaccttgccacgtcggctgcaaatgttcaccgctgtcgaggtcgatggtcttgatatgaaacgacaggcctttttcctgcaacgccacccaggcggataacacataaggggagaaaaagtgggcatctgaccaaagcgtgatagcgggtttactcattatgtcctcggcaataaagggggctggctatcaaactatagagcctttttgtcactgtcacgtgacgaatactcacgtaagtcgccgcgctttctatacttgtggtgttcagatgattaaacaaccggagctgcaatgatcgatctctatttcgccccgacacccaatggtcacaaaattacgctgtttctcgaagaagcagagcttgattatcgcttgattaaggtagacctggggaaaggcggtcagtttcgtccggaatttttgcgcatttcgcccaacaacaaaattccggcaattgttgatcattctcctgccgatggcggcgaaccgttaagcctctttgagtctggtgccattttgttgtatctggctgagaaaacaggactctttttgagtcatgaaacgcgtgagcgcgccgccacattacagtggttattctggcaggtaggcggactggggccgatgcttgggcaaaatcatcattttaatcacgcagccccccaaaccattccttacgctattgaacgttatcaggttgaaactcagcgtctttaccatgtactgaacaagcggctggaaaactcgccctggctgggaggcgagaactacagcattgcggatattgcctgctggccgtgggttaatgcctggactcgccagcgaattgacctcgcaatgtatccggcagtcaagaactggcatgagcggatccgttcgcgccctgccaccggcaggcactgctaaaagcacaactcggtgatgagcgttcggatagttaacagaaacaggttctcgtgtattatttcatcctaagtaaaacaacggagaacctgcaatggcacaacctgccgctattattcgtataaagaaccttcgtttgcgtacgtttatcggaattaaggaagaagaaattaacaaccgtcaggatattgttatcaatgtgacgatccactaccccgccgataaagcgcgcactagcgaagatatcaacgatgcgctgaattatcgcaccgtaacgaaaaacattattcagcatgtagagaataaccgtttctctttgctggaaaaattaactcaggatgtgctcgatatcgcacgtgaacatcactgggtgacgtatgctgaagtggagatcgataaactgcacgcgctgcgctacgccgattcggtatccatgaccttaagctggcagcgttaaccgccatatcgggaggctgcatgaacatagtgatcaccggagggacgggattaattggtcgccatttgattccgcgtttgctggagctgggccatcaaatcacggtagtgacgcgtaacccacagaaagccagttccgttctcggccctcgggtgacgctatggcaagggctagccgatcaaagcaacctcaacggcgttgatgcggtaatcaacctggccggagaaccgattgctgataaacgctggactcacgagcaaaaagagcgtctctgccaaagccgctggaatatcacgcaaaaactggtcgatttgattaatgccagcgacacgccgccgtcggtactcatttccggctcggcaacgggctattatggcgacttaggtgaagtggtggttaccgaagaggaaccgccgcataacgaatttactcataaactctgcgcccgctgggaagagattgcctgccgggcgcaaagtgacaaaacgcgagtgtgcctgctgcgaaccggcgtggtactggcaccggacggcggtattctcggtaaaatgctgccaccgtttcgtcttggcctgggcgggccgattggttccggtcggcagtatcttgcctggattcatatcgatgatatggtcaacggcattctctggctgctggataacgagctgcgcgggccatttaatatggtttcgccctacccgatacgcaatgaacaatttgcccatgcgctcggtcatgcgctgcatcgcccggctattttgcgcgtccccgcaaccgccattcggctgttaatgggcgaatcttcagtactggtattaggtggacaacgcgcgctgcctaaacggctggaagaagcgggttttgcgtttcgttggtacgatttagaagaggcgctggcggatgtcgttcgctgatgtggtttactgcaaacatccgccagttaactcccggtgttacagggttagtggctttgcgctataagatcgtctggcgatagtcgggtcaccatcataactaactctctgtctaaacctctatccagcatctcctgagcaatacgcagggcttcttcgcgtttgcccagaattaatccatcattccgcccttcttcacgtaatctgtcagcaatggtcatcagtttctccttttcttgtggtgcgcgttctgctatctcaccaataaatgcacggaaacgctgggcatctcccgtttgtaatacataattaaacagggcttttagctgtctgtcattagtgttccctgtaactagcagcgaaacaatttggtcgactaatcccaacagatcgcgctgacgaatatgtttctgaattaactccaacagcgccattttgcggtgttgcataatctcgtcatccggcaccacggtaatatccaccaacggaaaagccgatgaatatattttacgggcaatcgcaggctcagcaaattcatcaagccagcagagtgaataaggataaggacttctgcaaccatgataaaacagcatcgggatcaccaatggaagctctttatagcccgcatcaagatggttttgcattgccgcaatggaataacgcatcatgcgaaaagccattaattcttccggcttactttggtgctctatcactacataaatataacccactccctcctgcgttttcacagaccacaagaggtcggaataatattgccgcaggtcgtcatcaataaaactgtttggttccagtttaagcgtcgttaaatcacacagtttgcgcagcggcgcgggaagatgaatatcaataaaatcccgcgcggtgtctggatggcgtaaaaaagatttaaataccgcatcatgcggcgtggaagttgtcgatattgtcatggcgttccgtcacccctcaaatttaagatgacgcgacaataaccacgattaacacccaatgcagcaggcagtttttatctttggacagcgaattcagaagtatttttagcggactgcaacttttacatttcagcggaagctgactcgcaaattccccatgaaaatactccggcagcgttagccaccggagaggaaattatttcagcgatcccttaaggaactgttgcagacgagggctttgcgggttgccaaataactgctccggcgcgccctcttcttctattttcccctgatggaggaaaatgacgtgagtagaaacatggcgagcaaagcccatttcgtgagtcactaccaccatggttttcccctcttctgccagttgctgcataatacgtaacacttcgcctaccagttcaggatcgagcgccgaggtaggttcatcaaacagtaaaacttccggttccatcgccagcgcccgcgcgatagaaacacgctgttgctgaccgccggaaagatgcaccggatatttcccctgcgcacgttcgtctatcccgacttttgccagatacttcaccgcccgctcgcgcgcttcctgcttgctcaggcccaacacctgaatcggcgcttccatgacgttttccagcaccgtcatatggctccagagattgaagtgctggaataccatcgtcaggcgtgtgcgcagtaagcgcagttgatttttatcggcgactttgagttgaccgtctttgtcgcgcaccagattgatcgtctggccattgaccacgatcgacccttcactcggtttttcgaggaagttaatgcagcgcagaaaggtacttttccccgatcccgacgatccgatgatgcttattacatctccggcattcgcttgcagtgagacccctttcagcacttcatgttcgccgtagcgtttgtgcaaatcgataacgtttaatttattctcggacatcgtattctcagtgcgttgaagaaggtttcacatgctgcaaccagcgtttttccgctctgcgaaagaggctgatcaggacataagagatgattaaatagagcaccgcggcaatgccgaaggcggtaaaaggttgatacgtggcggcgttaatatcgcgggctattttcagcagatccggcacagtggccgtaaacgccagcgcagtagagtgcagcatcaggatcacttcgttgctgtatgccggtaacgcaatacgcagcgcagaaggcaaaataatgcaacgatacattttaaaagtcgagaagccataggctctggcggcttcaatttccccatgcggaaccgaacggattgccccagcaaaaatctcggtagtgtaagcgcaggtgttaagcgtcagcgccagcacggtacagttcaggccactgcggaagaaagcgttaaggaattcggttcccttaacaatctcaagcgtgtacatgccggaatagaacaccagcaactgaacatacagcggcgtaccgcgaaaaatataggtaaataaccagattggaaactggatgtatttattactggagacacgaccaatcgccagaaacagcgccaggactccgcctatcactaccgacaaaataagcagccacagagtgatcgccacaccagtaaagcgataaccgtcggtccacagcagcggtttccagtattcatgtaagatttcgatcacaggtcagccctcttcacacccacggagtagcggcgctcaaggaacagcagcacaccattggaaacagtggtgaaaaccaggtaaatcacgccacagacgatggcgaaatagaacggttcccaggtacttttgcctgccagttgggtggctttgaccacatcttccaggccgagtaacgaaaccagtgcggtagatttgaggatcacctgccagttgttgccaatgcctggcagggcgtaacgcatcatcgccggaaacatgatccgccgaaacacttgcccacgagtaaaaccgaacgccgtcgccgcctctatatgccctttcggcactgccataaacgcgccacggaacgtttcggtaaaataagcaccgtagataaaaccgagagtaataataccagcgaccatcggatcgatatcaatctgcccgacgcccatcgcctccgtcaccgtgtttagtgcaatctgcaaaccgtagaaaatcagcagcatcaacaccaagtccggcacgcctcgaatcagcgtggtgtacccttcgaaaatcagccccgaaagccgattttgcgagagcttaccgccagcgccaattaaaccgatgattacagcgagcactacagagctgatagccagctccagcgtgacgagcgcaccctgtaaaataacacctgaaaacccatacaacatgctgcctgtcctgtcgtgtgtggtgaattaccgcctcttgtctccctccggttacccgaagggagcgggctttctttcaccgatggcgattagccaccataaacatcaaaatcgaagtactttttcgctaatttctcgtaagtaccgtcagcgcgcatttcggcaaaggctttgttcagtgcttcgcgcagttcgttatcttctttacgcaggcccatgccggtccctacgccaaacagtttttcatctttaacagacgggccaccgaatttgtaatctttaccgacaggttgtttgaggaaaccttcgctggcagcgacctcatcctggaacgcggcatcaatacgtccggcagtcaggtcagaataaatgttgtcctgcccctgatacgagacgatttcaatgccttttggtgcccaatgttcgttaccgaacgtctcctgggtggtgccctgcaatacgcctacccgcttgcctttcagcgactcgactgtcggctgaatgtcggaattttcgccaccaccagacgagaatcggcagcgtacagtttgtcggtgaaggcaatttcttgctgacgtttttccgtaatggaaagcgatgacatgatggcgtcaatcttcttcgcttttaaggacgggattaacgcatccagcggattttcgacaaacgtacattgcgtattgatgcgtttgcataattcctttgccagatcgatatcgaagccaaccagttcgccttgtgaattttttgattcaaatggcgcataggtcgggtcggtaccgatgcggatgttttgcggaatcgcagcaaacgccgcagttgcgctggagaaggccagaaccagagagagcgatagcaccagttttttcataatgtcctcaactgacagtctttttatagggaatatttacaggtttgttacacttatcgtgccataaaattgaccatcaaggcaaaatatcccgccccgttagacgtattatttttcattaaaaatgcttaagtatgcatttcaatgcaccacgatagtgcaacaaacctggcgtgcaccatgatgatcattccatcaggtacagcttcccagcgacgtatcagtcaccgtagacattaaagtcgaaatactttttcgccatcttgtcgtaggtgccgtcctgacgcagctcgccaagcgccttattgaaggcagccgtcagttcagcatcatctttacgtagccctacaccggtgccatcaccgaagtattttttgtcttttactgatgagccagcaaaggcgaaatctttaccagcaggttgcttgaggaatccttcgctggcagcaacttcatcttgtaacgcagcatccagacgtcctgcagccagatcggaatagaccaaatcctggttggcataggccaccacatccacgcctttgctacgccaggtctcgttagcgtaagcttcctgggttgatccctgcagcacaccaacatgtttacctttcagtgaatccagcgttggctgaatcggtgaacctttggcagcaatcaaacgagaatctgcggcgtacagcttgtcggagaaggcaatctcctgctgacgtttatcggtaatggaaagcgacgaaataatggcgtcgatttttttcgctttcagtgaggggatcagcgcgtcaaagtcactagcaacccaggtacatttcacctgcatccgtttgcacatctcgttaccgagatcgatatcaaagccaacaaaatcacctttagcatctttcgacgagaacggcgcataggtggtatcggttccgatacgtaccgtctccggtagcgccgcatagctggaagccgctgcggagagaccgactaacaaagacagagcgagaatcgacttcttcatacataaccctcaagtgaaaatggcttttctatgttgtgtattgtgttgtgtgtttgcaggctctttcatgcaggtcttatgccatcttgacgacaacagtaacattcaacgttaaatatgttaataagacgttgcattattgtcctgaagttgaagatagcaggtatagcggttgaatcgcagcgtttcgattgaatggcagaaacaaaatgtcgaggatttgatcgcggttgcaaaattgccctgaaacagggcaacagcggagttatgcgccctgccagcgggcaaagagatcttcaggaagggttatcgcaaactggtcaagaacacgattaaccgtctgatttatcacatcatcaagggactgtgggcgatgataaaacgccggaacgggaggcataatcaccgcaccgatttctgctgcctgagtcattaaacgcagatggcctaagtgcaatggtgtttcacgcacgcagagcaccaacgggcgacgctctttcagcaccacatctgccgcacgggtcagtaaaccatcggtgtagctatggacaatgccggaaagggttttgattgaacagggtaaaataaccatccccagcgtctggaaagaaccggaagagatgctggcggcaatatcgcgcgcatcgtgcgtgacatcggctaatgcctgcacttcgcgcagagaaaaatccgtttcgagggataaggtctggcgcgctgcctggctcatcaccagatgcgtttcgatatctgtgacatcgcgcagaacctgtaataagcgcacgccataaatcgcgccgctggcaccgctgatgcctacaatgagtcgtttcataaatagttgccctgtcagacttgcaggcagactttgcaggatttcggcgggagttgcaagtcagggtgccagaccggcaccctcagcgaaggcatcatccttcgttatgcatttcgagattttccacttcgttctgacgttgcactgctttggcgtcatcattacgtaacgtatcgaggaaatcgaggtagccctgatcaacatctttggtgacgtagacgccgttgaacaccgagcattcaaactgctggatatccggattttcagcgcgaacggcgtcgatcagatctttcagatcctggaaaatcaacccgtcagcaccgatgatctggcgaatttcatcaacttcgcgaccgtgagcgataagctccgtggcgctcggcatatcaataccataaacgttcgggaagcgaatttccggtgccgcagaagcgaggtacactttcttcgctccggcttcgcgtgccatctcgataatctgctcagaagtggtgccacggacgatggagtcgtcgaccagcaggacgtttttatcgcggaactcggcgcggttggcattcagtttacggcgcacggacttacgacgcagctgctggcccggcatgataaaggtgcggccaacatagcggtttttaacgaagccctggcggtacggtttgcccagaatacgagcaatttccagcgcgatatcacacgaggtttctgggatcgggatcaccacgtcgatatccagatcttcccattcgcgggcaattttctcgcccagtttcgtgcccatattcacacgcgcgctgtaaacggaaattttgtcgatgaacgagtccgggcgagcaaagtatacatactcaaacaggcacggattgctgaccggattgtcagcacattgacgggtaaacaactgcccttcttcagtgatgtaaatcgcttcgcccggcgcgacgtcacgcaggaaatcaaagcccagcgtatcgagcgctacgctttcggaagcgaccatatattctgtacggttctcgtcaatatcacgttttcccagtaccagcggacgaatcccgtttggatcgcggaaagcaaccataccgtggccgataatcatcgccacacaggcatacgcgccgcggattaagcggtttgtggcagcaatggcagcgaaaatattgtcggcttccagcgggtagtggcggaaattgtccagctcgctggcgaagatattaagcagaatttccgagtcggaagtggtgttgatgtggcggcgtttttcttcaaacagttttttacgcaactcgtgagcgttggtcagattgccgttgtgggcaagcgtaatgccatacggggagttaacgtaaaacggctgcgcttcagaggcgctggagctgccagccgtagggtaacgcacatgaccaatgcccatattgccctgcaaacgctgcatatggcgagcttcaaatacatcgctcaccagcccgttcgctttacgcaaacggaagcagttattggcatctatggtgatgatgccggcggcatcctgaccgcgatgctgaagcaccgttaaggcatcataaatcgactggttaaccggcataacaccggcgataccgacaataccgcacatacgtctttttcctcgttaagccacatctcagagcacttacgctctgggcaagaaacttgacgagctttgcagataatcaaaaaccatctgatgataaaactgaattgcgggatcagctgtgatttgctccagtcttcgcttttcgacaccccggtaaaggagtcgagaaagaagagaatggcggcaacaatcaacacaccgcgcaacgcaccgaaacagacgcccagcacccgatcggtgcctgacaaccccgttttctccaccaactggcctatcacgaagttcacgatagcaccaacgatcagggtagcgataaacagtaccgcgatggcaatcccatttcgaaccagttcgtcttcaaagcccgtaaaccagactgacaggtaagtgtagtaatgactggcaacaaagaaagcacaaccccatgtcaccagcgataacgcttcacgaacaaagccgcggatcaggctaaccagagaggaaaaagcaatcaccgcgattatggcgtaatcaatccagaccatatgtgtcccacgattttacgccctgtcatcctgttcggggcgcattctaacagaaaaagaaaacgtttgcgtagggatttccttcccacgcatcaataaaaatggcgctgaaaaaatattcaacgccatcgactttttatgcctttgcggcatcgtgcaatgcgtgtcggatgcggcgtaaacgccttatccgacctacggttctaacactgcccaggcctgataagacgcgccagcgtcgcatcaggcaagactgtattaattcggcgtatagcccattaccacgccacttaagccagaaagttgcttcaactcacccagcgaacctttcagcttatctttcgaggcatccggcccaaccagaatacgggtaattttaccctgcactggcgtggatggcgacgtataaacccgataaccggcaccgcgcagcttaccgacaatctcattcactttatcggcatttttcagcgcacccagttgcacaacataggctttacccgtcggtgcagctttttcttccacgaccggcttcggttctggcttcggcgcaggtggtgcttcaaccttcggtttaggcggctccaccggtttcggcttcggtggggcgaccggtgcaggttccggttcaaactcggtgttattggctgcaatagtggtcggatcgagcgacggtgctgcggcatcacctgcccgcacctcttccgctgcgccttccggcggctgcgtcggcaacgcctgggtggcggctggcatcatatcaggctcatcgcgatcgcccgctttcggcaccagcgggatagccgcgaactcatcctgataatgttttttctgcccgtccagcagccctggaagtacaatcacccccagcgccaccagcacgatcgtgcccactaaccgattctgaaacttacttgccaccgcttctcctcgcgtcaatcacttccatgacatgtgcgaccgtgtggaaagaaccacacaccagcacggtgtcttccgctttagcgtccgccattgcggcatcccatgcctgcgcaacgctatcaaatgatttgccgttacccaaatgctcaagcagttgttctgccgtggcaccgcgcggcccttccagtggcgcacaataccagtcatcaaccacgcttttcaaccaggccagagttccggcaatatctttatcatgtagcataccgataaccgccagcacgtgcccgtttttcggtaaggctttcatacgcccggtgagatattccgccgcatgtggattatgcgcgacatcaaaaataacgcgtggcgactcgctcacaatctggaaacgtcccggcaaaattgcgctggcaatcccgtcgcgaatggcattttcactgacctccagcccgctggcacgcagtgccgccagcgccgttgcggcattcggttgcgggacaagcggcaacggcaaattttccagcgtgccgtgagcatcgctaaacgtccagtcatgatcggtgacggaatagttccactcaacgccccgacgttgtaacagtgcacctttttcctgcgccacatcagcaatggtagaaggcatttccggctcaccgacaattgccggtttttcgctgcgaaagatgcctgctttctcgcgaccaatactttcgcgatctggccccagccagtcggtatgatccagcgcaatgctggttactaccgcgacatcggcgtcgacaatattggttgcgtccagacgaccgcccagccctacttccagaatcaccacgtcaagttgtgcctgcttgaacagccacaacgccgacagcgtaccgtactcgaaataggtcagggaaatatcaccgcgtgccgattcaatctccgcaaaagaggcggtgtgggccgattccggcaattcttggccctgcacacgtacgcgctcggtataacgcaccagatgcggtgaactgtagacgcccactttgtaccctgccgccatcagaatcgactccagcgtacggcaggtggtgcctttgccattcgtacccgcaacggtaaacacaaatggcgctggtttcagaacgccaagacgcgccgcgacctggctcacgcgctcaaggccgagatcgatagttttactgtgcaggttttccagataagaaagccacgaagccagaggcgacgcggcttgaggagtgcgtttgataatcatggtatccgctgattcgttacggtgagaatagcaaaagggcagagccagtggccctgcccttatcagttatcaggcctcaggttcctgatccggtaccgggggtaccactacgccttcacgcggcgcttcaggattcggcgctggcagattcatcaacttcgccagaatgctcgccagtttcaggcgcatttccggacgacggacgatcatgtcgatcgcgcctttctcgatcaggaattcactgcgctggaatcctggcggcagtttttcgcgaacggtctgttcgataacacgcggaccggcaaagccgattaacgctttcggttcagcgatgttgagatcgcccagcatggcgaaacttgcagaaacaccgcccatcgtcgggtcggtcagcacggagatgtacggcaagccgcgctcctgcattttgccagtgccgcagaggtttcgccatctgcatcagcgacatcagtgcttcctgcatacgtgcgccaccagaggcggagaagcagatcagcgggcagttatcttccagcgcctgctcaacggcacgcacgaaacgtgcacccacaacagaccccattgaaccgcccataaaggcgaactcgaatgccgcagcgacaaccggcattccatacagagtgcctttcatcaccaccagcgcatctttttcgccagtttctttctgcgcagatgccagacggtctttatacttcttggagtcacgaaacttcagcacatctttcggctcaagctcgctacccagctccacaaggcttccttcatctaacaggctatgcaggcgattacgcgctgtcatacgcatgtgatggtcacacttcggacagacctcaagattacgttccagctcagcgcggtataaaacctgaccgcagctatcacacttagtccacaccccttcaggaatgctcgccttgcgggtgggagtaatgttgcttttaattcgttcaatccagctcattagggacctttctgtctgaacctggttcgatgccagttttatctttggggacgcataatgccatttttgcccccaacagaccatgaatgttgcacattaaaacataacagcccgaaactttggataaaaaagtggtcgaaccgcggagttactttttattttgcggcgcgtgccgcagcgcgtttgtgacgaataaattcgaaaaccccaggcaatattgaaacaaaaataatgccaacaatcatcagcttaaggttgctctgaatgaaggggagcgtgccgaagaaataacccgcgtaggtaaaaatcagtacccacaacagtgcgccgatcacgttataagcggcgaaatgacggtacgacatgtggcccattcccgcaccaaacggcgcgaacgttctgacgatcggtacaaaacgggcgagaataatcgttttgccgccatgtctctcgtaaaactgatgagtcttatcaagataactgcgacgaaagattttcgaatccgggttactgaacagtttgtcaccaaataaccgtccaatggtatagttcactgcatcaccgacaatagcggcaatcaacataagcaccaccatcatatggacattgagatcgttagtttccagcgacgccaatgcaccagcaacaaacagcagcgaatcaccaggcaggaatggcgttaccaccagccccgtttcgcagaacagaatcaaaaacagaatggcataaacccagacgccgtactccgcgaccagctctgccagatgcacgtcaatgtgcaggataaaatcgatgaggaaataaatcaggtccatatttgcctatgccttgtactcgtcatctttcaggctgtaactacgttgctacagcctgaaatgttccgagcattattctcgttagtccgccagaaatagcgggcccattggcggttttggaagatcataccggtcagggtaatccaccgcgaccagatacagcccttccgcttttgccgttgctgccgccagcgttctgtcctttgccgccagcaactctgctatccagctctccggctggttgtgggcaccgacttccatcaggctgccgacaatattcctgaccatatgatgtacaaaggcattcgctttgatatctaccaccacataaggaccgtgacgcgtgacattaatatgcataacgttacgccacggggttcgggactggcactgcaccgcacggaacgaggtgaaatcattctcgcccagcaagcattgcgcagcccgatgcatccgttcagcgtccagcggttcgtaaaaatgggttacccctttactcagtaccgccgggcgcagccgatgattgtagatgatgtagcgataacggcgagccgtggcgctaaatcgggcatgaaaatcatcaggtacagctttaacccaacgcacggcgatgtcaccaggtaaattcgcatttacgcccaaggtccacgccgcgtctttgcgctgcgcggtcgtttcgaaatgcactacctgcccggtaccgtgtacaccagcgtcagtacgcccggcgcagaagacggtaatgggttcgttcgccacctgggagagcgccttttccagcttctcctgcacactgcggacttcattctgccgttgccagccgtaatacttactgccgtcgtactcaatgcccagcgcaattttataaactggcggttgttgctggtccgacattagtacagatactcctgcaccagtttctcggcgatttttactgccatcagcgcgccgccaaagcgaacgttatcggccaccgaccagaactggacttgctccggcataccgtagtcattacgcacgcagccaacagaaagatgcggcgtacccgaagcatcccctacctgagtcgggaattcgttctcttcagagagcacaatatcttcgccctgagcaaacgcatcacacgcttcttctgccgccagcggacgcagtgcttcaaagttgaccatctgggcatgaccgtagaataccggtgcctggacgacgcttgccgaaatcatcagcccttcgtcctgcaggattttgcgtacttcgtcaacgatacgacgttcttcacgcacgctaccttcgctatccggcaacaacggcagcatattgaacgccagttgacgaccgaagaaatcttcttcgtcaatcggaatgccgttgagcaatttcgcactctgccccgctaacgcatcgaccgcttttttgccctgggcggaggctgaaatcaggctggtaacactgatacgcgacaaaccgccctgatcgattaacggtttcagtgccgccagcagctggctggtcagactgtctggtacggcgatgacattccggttgcggtaatcggtcagtacaaacgggtttacttccggcaccaccagcggtacgtcgggttcgagagcaaacagtccgctgctgtcgatcaccaggcaacctgagttggtcgcttcttcaacccaggcagcggtagcttctttgcctgcgacaaaaaatgccagctgcgcctgcgtccagtcgaattcagcggcatcctgcacggtgattgtcttaccaccaaagcgcagttgttcgcctgcgctttcgttacgtgccagtgcataaatttccccaaccgggaactgacgttcagccagcgtttcaagcagggcttcgcccacagcgccagttgcgcccaggacggcaatgttccagccttcagacatggtggtttactccagaaatagcaaagctccctgccaatgttacagcagagagcatgaagaagagattaacgtgccggatgatgaacggcgttaaaacccagtttacacagcaatgatgccgcactggcgtcatcacaaattacatacagagatgaccattcacggcgctcaagatagtttttgcgcagtttatcgaactcacccggtatcccggcgactttacgcagcggtgcgtcatcgcggcgcacatcatacaccaaatgcaccagccttttcagcgtcggttgatcgagcgggccatgcagcgtaatgcgaccaaactctggcgcgggcagtaatgtatccagcgcaacgtgctgttcatgcccaataaacttgctataggcttcaaacacttgcgtagtaccgcgtgctttaccttccagggtatagcctgcgatatgcggcgtgccgatatccacttttgtcagcaattccacgttaagttccggttcgccttcccagacatccagcactacgcttaacttctggccttcattcaggcaggtcagcaacgcagtattatcgacgactgcgccacggcaggcgttaatcagaatcgctcccggcttcaggctacggatcagtttttcatccgccagatgcagcgttttgtacggcccgtctttgaagagtggcgtatggaaagtcagaatatccgcatgctgaactaattcatccagcgagcggaaatcaccctcatccccacggtcaacgcgaggcggatcgcaaagcaatgttttaatccctaacgcttccagtcgcgcctgcaatcgacgtccaacgttaccaacgcccacgatccccaccgtacggtcgtgcagtgaaaatccatcgcgttcggcaagcatcagtagtgaggagaaaacatattccaccaccgcaatcgcattacagccaggtgccgcggaaaaaccaattcccgcctgctttaaccatgcttcatcgacatggtcggtccccgctgtggcagtaccaacaaatttaatgggttttcctgccagcaaagattcattcactttcgtgaccgaacgcaccatcagcgcatccgcgtctgccagttgagcgacggggattggacgcccgggaaccgcggtcacctcacccaaacggctaaataagtcgcgggcataaggcatattttcatcaacaaggattttcacgtttgtgttacctgtatgagacgagagttaaccggacaagtgtgccataatctcgcggccaggcatacttgcgaagatttcaggtataaggatacgtaatgatacaacctatttccggccctcctcctgggcaaccaccaggtcagggagataacctgccgtctggcgcgggcaatcagcctttatccagtcagcaacgtacttcgctggaaagcttaatgacgaaagtgacctcactgacgcaacagcaaagagcagaactgtgggcgggtatcaggcacgatattggtctgtcgggagattcaccgctgctttcgcgtcacttccctgccgctgagcataacctggcgcaacgtctgctggccgcgcaaaaaagccattctgcccgccagcttttagcgcaattaggggagtatttacgtctggggaataatcgtcaggcggtcacggattatatccgtcataactttggtcagacgccgctgaatcagctctcaccggagcaattaaaaaccattctcaccctgttgcaggaagggaagatggttattccgcaaccacagcagcgcgaggcgaccgaccgtcctttattaccggcggagcacaatgcgctaaaacagctggtgaccaaacttgcggcggcaacgggggaacccagcaaacagatctggcaatcgatgctggaactttccggggtgaaagatggcgagttaattccagcgaaactgtttaaccatctggtgacctggctacaggcgcgtcagacgctaagccagcaaaatacgccgacgctggaatcactacagatgacgctaaaacaacctttagatgccagtgaactggcggcgttatcggcatatatccagcaaaaatatggtctttctgcgcaatcatcgctttcttctgcccaggccgaggatattcttaatcagctttatcaacggcgggttaaagggattgatccgcgtgttatgcaaccgctgcttaatccttttccaccgatgatggacacgttgcaaaatatggcaacgcgtcccgcgctgtggatactgttagtcgcgattatcctgatgctggtctggctggttcgttaaccccgacgaaatgacagtatcgtgacaataatacccagcaccgcagagatcgccccggcaagaaataccgaagagtaaccaaacgtggtcgccagcattcccgccagcggcccggagacgccgagggcgatatcctgaaacgcggcgtaaccgcccagtgcggtgccgcgaacttgtgaggggacgcgtttaaccacctccacgcccagcgcaggaaagataagcgaacatccggctccggttaacgccgcgcccgctaatgcgacccatgcacctggggcttgccagagcacgcaacaagcccaccgtttctacaagcagagagacaatcgccactttcacgccgccaaaacggtccggcatccagccaaacatgacgcgcatcacgacaaatgcgccgccaaacgcggtaagagtaaagcccgccatcgcccatcctttgctggcaaagtagagcgaaacgaaagtcccgataacagcaaaaccaacgccttgtagtgccagacctaaccctggtttccagataagcccgacaacgctccacagcgatggacgttctcccgccagggccggtactttgcgcactgtgccgttacaggcccacgccagtacgggtaataccattgtggtgatcgccagtgcggcaaaaccgtaatggctatgaatcaacaggccaagcggagcaccaacagcgagggcaccgtaaatcgccattccgttccatgacatcactttgccagagtgttttggccctacgatgcctagtccccaggtcagagcgcctgtcagtaactggctttcaccaaagccaagaatcaaacgcccgacgaccaacagagcaaatttgaacggtgcggagacaggcaaaatcgccgccagcagcaacgcgccgccagccagaccacaagctaacattccctgaagcgccgaacgttttgcaccatattgatcggccagtcgcccggcgtaaccacgcgtcagcaccgtagccagaaactgaatcccgacggcaatgccgaccatggtattgccatagcccagttcatgatgaacaaacagcgggataaccggcaacggcaaccctacggtcatgtaggtgagaaaaaccgcaaaagcgatgcggaagagcgaaaaattggcagaagatcgtgtttcggtttggcttacagcagtcatgcattactccagaatgcagcgcaaggcgaggagtatccccgtctcatctctctggtttcagggttacagtgcgttggcaggatttaacgcgtacgtcttttcagaaggaaatcgacaaagcgggaagtttgcctggaacaggcggcgattgtcaatgatgtgaaaaagggaaccatcaggttcccttttgcgttagtgccggaggccgcattagcgcgtaacgtcggatgcgacgctggcgcgtcttatccgacctactccgacctactccgactactccggcctactgcgaattaatctttcagcttgcgcattaccagcgtggcgttggtgccgccgaagccgaagctgttagacataacggtggtcagttcgcgatcggtcgtttcggtcacgatgttcagacctgcagcctgctcgtccagctcttcaatgttgatgctcgggcgataaagccgtgttccagcatcagcagagagtagatagcttcctgtacgccagcagcgcccagagagtgaccggtcatggctttggttgcagaaatcgccgggctcttatcgccgaacacttcacggatagctgccagttctttcacgtcgccaaccggagtcgaagtaccatgagagttcaggtaatcgattggggtatcaacgccgtgcatcgccatcttcatgcagcgtactgcgccttcgccagacggagcaaccatgtctgcaccatcagaggttgcgccgtagccaacgatttcagcatagatgtgagcaccacgcgccagcgcgtgttccagctcttcaaccactaccataccgccgccgccagcgataacgaaaccgtcacggtgagcgtcgtaagtacgggaggctttttccggggtgtcgttgtatttagtagacagcgcacccatcgcgtcgaattcgcaggccatttcccagcacagctcttcgccgccgccagcaaacacgatgtcctgtttgcccagttggatctgctctactgcgttaccgatacagtgtgcggaagtcgcacacgcggagctgatggagtagttaacgccatgaattttaaacggcgtggcgaggcaggcagaaacgccggatgccatcgctttggtgaccacatacgggccaaccgctttcaggccgcgcgggccgcgcattgcgtcagcgccgaacacctggaaacgcggggaaccgccgccagaacctgcaatcaggccaacgcgcgggttattctggtaagcttccggagaaaggcccgcatctgcgattgcctgctccatagaaaggaatgcataaatggatgcgtcgctcataaagcgcacaactttgcggtcaatgaggccagtggtatccagttttacgttgccccagacgtggctacgcatgccggaatccttcagctcctgagagaaagtgatccctgaacgtccttcacgcagagatgccaggacttcctgctggttattaccgatgctggaaacaatgcccaggccagtaatcactgcacgtttcattcaatacctctgtaagtcgcacatagagtaagtttcgaatgcacaatagcgtacacttgtacgccgaacaagtccgatcagccatttaatagagaaatttgcgcagccttacacacatcgctaagatcgagccaccgcctgtaagacgagtaacttacgtgaaacactactccatacaacctgccaacctcgaatttaatgctgagggtacacctgtttcccgagattttgacgatgtctatttttccaacgataacgggctggaagagacgcgttatgtttttctgggaggcaaccaattagaggtacgctttcctgagcatccacatcctctgtttgtggtagcagagagcggcttcggcaccggattaaacttcctgacgctatggcaggcatttgatcagtttcgcgaagcgcatccgcaagcgcaattacaacgcttacatttcattagttttgagaaatttcccctcacccgtgcggatttagccttagcgcatcaacactggccggaactggctccgtgggcagaacaacttcaggcgcagtggccaatgcccttgcccggttgccatcgtttattgctcgatgaaggccgcgtgacgctggatttatggtttggcgatattaacgaactgaccagccaactggacgattcgctaaatcaaaaagtagatgcctggtttctggacggctttgcgccagcgaaaaacccggatatgtggacgcaaaatctgtttaacgccatggcaaagttggcgcgtccgggcggcacgctggcgacatttacgtctgccggttttgtccgccgcggtttgcaggacgccggattcacgatgcaaaaacgtaagggctttgggcgcaaacgggaaatgctttgcggggtgatggaacagacattaccgctcccctgctccgcgccgtggtttaaccgcacgggcagcagcaaacgggaagcggcgattatcggcggtggtattgccagcgcgttgttgtcgctggcgctattacggcgcggctggcaggtaacgctttattgcgcggatgaggcccccgcactgggtgcttccggcaatcgccagggggcgctgtatccgttattaagcaaacacgatgaggcgctaaaccgctttttctctaatgcgtttacttttgctcgtcggttttacgaccaattacccgttaaatttgatcatgactggtgcggcgtcacgcagttaggctggaatgagaaaagccagcataaaatcgcacagatgttgtcaatggatttacccgcagaactggctgtagccgttgaggcaaatgcggttgaacaaattacgggcgttgcgacaaattgcagcggcattacttatccgcaaggtggttggctgtgcccagcagaactgacccgtaatgtgctggaactggcgcaacagcagggtttgcagatttattatcaatatcagttacagaatttatcccgtaaggatgactgttggttgttgaattttgcaggagatcagcaagcaacacacagcgtagtggtactggcgaacgggcatcaaatcagccgattcagccatacgtcgactctcccggtgtattcggttgccgggcaggtcagccatattccgacaacgccggaattggcagagctgaagcaggtgctgtgctatgacggttatctcacgccacaaaatccggcgaatcaacatcattgtattggtgccagttatcatcgcggcagcgaagatacggcgtacagtgaggacgatcagcagcagaatcgccagcggttgattgattgtttcccgcaggcacagtgggcaaaagaggttgatgtcagtgataaagaggcgcgctgcggtgtgcgttgtgccacccgcgatcatctgccaatggtaggcaatgttcccgattatgaggcaacactcgtggaatatgcgtcgttggcggagcagaaagatgaggcggtaagcgcgccggtttttgacgatatctttatgtttgcggctttaggttctcgcggtttgtgttctgccccgctgtgtgccgagattctggcggcgcagatgagcgacgaaccgattccgatggatgccagtacgctggcggcgttaaacccgaatcggttatgggtgcggaaattgttgaagggtaaagcggttaaggcggggtaatctgctctcgcagtgtttgccggatgcggcgtgaacgccttatccgacctacgtgtgacgtgtaggcctgataagacgcgataagcgtcgcatcaggcatggtgctccagacgccgcaacttactgctgtgacgcctgctgaaacaggttttcccacatatcggtcaccagcgcctggtcacgcggcgacaattcaccggcaccaatggctttttccagactctggctaacggtcgtatgcaccgcctgagcggagtggtcatcaccactttccagttctgcgatggctaatgtcaggtggccacgcaaatacccactggcaaacaactcatcatcactggcatggtcaaccataccgtcgattaatgccagaatgcgtgattcaaactccgcgatcatcttctttcctcattgtaaaacgtggcgctggctttagttgagcgcttccggccacgggaactgttccgccgtaagttccggcgtgtgataataattttgtagtgctttaatgaagcgtgccgggcgttcaggaatgccgtttgctaggtaatccatcacctgcgcatgtacccgccgttgaaacaccacacgatccggttcgaagtcgccttccagattgtcgcaactgacgttaaacggatatcccgccgccacacagaacaaccagtcgagtgcctgcggcttcacttcaacatcttcaaactggctttgcgtttgggcatcacgcccatccgggcaataccagtagccgaaatcaaccagctcacggcgcgcttttccggcaatacaccagtgcgaaatctcatgaattgcgctggcataaaagccgtgggcaaagacaattcggttatacggtacttccgcatcagcaggaagatagatcggttcgtcgtcgcctttaatcagacgggtattaaattcatcggcaaagcagctattaaaaatttcaatcaactgctcatagtggtgtgtactgttcattagttcatccccaaccagtggaggatctcctgtccgtggctatcgtaaagtaatttggcactcatcaccgccgagacgataacaatcatcgggcggatcagcttttgtcctttgctcaacaccagccgtgaacccatgcgcgcgccgaggaactgccccaccagcatcacaaagcccgtcgcccaaatcactttgccgccgagaataaacagcagcagaccgccaatgtttgacgttgcgttgagtaatttggcgtgagccgtggctttggcgaggttgaatccgcacagcgtaacgaaggccagcgcgtaaaacgatccggcagccgggccaaagaatccgtcataaaaaccgacgcagccaccggcaattaacgcgaagggtaaaccgtacatccggcgctggcgatcttcttcacccagctttggcatcagcaagaaatagaggccgatacaaatcaccagaatgggcaaaatctgccgtaagacatcagcctgaacgtactgtaccaacagtgcgccgctcattgagccgacaaaggtcatggcaatattgagtttctgatcgcttaaactaaccactttgcggcgaataaagtagatagtggcggaaatagagccgccgcaggcttgcagtttattggttgccagcgcattagcgggagacatccccgctgccatcaatgccggaatggtgagtaacccaccgccaccggcaatcgagtcgataaatcccgccagcatggcgacaaaaaagagaactcccagcaacagcggggaaaccataaacaggctattaaacgtttccattagatcacgtgctcatccagtagcgcctggcaggaaggcggcaacggagacggtgtcttcttctcaggctttgttgttcccggttttggaggtgcaaaccagctttgcagttctgccccgcaaccatcgcctggtggcggtaaaggttgatcttcacactccagactatcggcaggacaacgtaatcgtacatgcatatgcgcgcgatgctggaaccagggtcgcactttgcgcaaccagtcgcgatcggtgcccgcatcaaggcaaagttgttgtttaatcgccggattaacaaaaatgcgtgtgacgtctttgtcctgggcggcgagtttgatcaagctgaaaatttctggcttccacagcgtggagacaacgtgtttaccgtcgcgggaaactaagtccagtgcttgcgggcgcaagagctgcgcggaggtccagcgagttttcggcagttgcagaaagatatcgacatccagtccggtctggtggctggcatgaccgccgttgaaacgcccaccagcgggcatccccatatcgccaatcagcaccgtacccatgcccagattgctcacctggctactcagacgctggataaacatcaccagatccgggtgaccgaaatagcgacgctgatcggtacgcatgacctgataatgttcggactgtatcggcagcgtgtcagcaccgacgatacagccattagaaaaactgcctatcgattgtgcgctacccggcacaggttgggttattttttgccacggcgtcgctgccaggctagcgctactggcaagcagagccagcagcgcaatcgcggttttgttcattttttaccagcgtggaatatcagtcttcacatcggcattttgcgcccgctgccgtaacaggtgatccattaaaacgatcgccagcatcgcttcagcgatcggcactgcacggatcccgacacagggatcgtgacggcctttggtgatcatctcaacttcttcgccaaagcggttaatagtgcgccccggcacggtaatgctggaggtcggtttcagcgccatatgagcaatgatttgctgcccgctgctgataccgccgagaatgccgcccgcatggttgctctggaaaccgtctttggtgatttcgtcgcggttctggctgccgcgcagcgccactacgtcaaaaccgtcgccaatttccacgcctttcaccgcgttgatgctcatcagcgcatgggcgatgtcggcatccaggcggtcaaagaccggctcgccaagtccggcggggacaccactggcaacaacggtgactttcgcgccgatggagtcgccctcttttttcagcgcgcgcatcagttcatctaacgcgtcgattttgtcggggtccgggcagaagaacggattttgttcaaccagcgaccagtctttgatttccagcggaatgtcgcccatctgggtcaagcagccgcggatttcaataccaaatttctcggcgagatattttttggcaatcgcccctgccgccacgcgcatggcggtttcgcgggcggaagaacgtccaccgccgcgataatcgcgcagaccgtatttttgttcgtaggtgtaatcagcatggcctgggcggaaaacgtctttaattgcgctgtaatcctgagagcgctggtcagtgttttcgatcaacaagccaatgctggtgccagtagtaacgccttcaaaaacaccggagagaattttgacctgatccggctcgcggcgctgggtggtatagcgcgatgtcccagggcgacgacggtcgaggtcatgttgcaggtccgcttccgtcagcggaatgcctggcggaacaccatcgacgatgcagccgagcgccagcccatgcgattcgccgaaggtggttacgcgaaagagttgtccaattgtgtttccagccatcacggctccgttattgttgtgtttgcgtgtttacttaatctttataaatcgcgaaatattcacgggccgccagcagctgctctttggtgagcataaacacaccatcgccgccgttatcaaactccagccaggtgaacggaacatccggatattgttccataagatgtaccatgctgttgccgacttcacaaatcaacacgccatcatcagcaaggtaatctgccgcgtttccaagaatgcgacgcgtcagtttaaggccgtcggtgccagatgccaggcccagttccggctcgtgacggtattcgtttggcaggtcggacatatcttccgcgtcgacatacggcgggttagtgacaatcagatcgtactgcactttcggcaagtcgcggaacagatcggaacgaatcggaatgacgttgtggatcagaccgtgttcttcgatgttctgttcggcaaccgccagcgcgtcgggagagatatctaccgcgtcgacttccgcttccgggaaggcataagcacaggcaatggcgatgcagccgctaccggtacacatatctaaaatatgctgcggttgcttgctgatgagtccggcaaatttattgttgatcagttcaccaatcggcgagcgcggcaccagcacgcgttcatcgacgtaaaattcatgaccgcagaaccaggctttgttggtcaggtaagccaccggaatgcgctcgttgacgcggcggatcacgcgttcaacaatacggtgtttttcgctggaggtcagacgcgcggtgcgcatatcttccgggatatccagcggcagatagagcgatggtaacaccagctgtacggcttcatcccacgggttatcggtgccgtgaccgtaccagatatttgccgcgctgaagcggcttaccgaccagcgcaacatgtcctgaatggtttgcagctcatttactgcttcatcaacgaaaattttatccacgtattcctccagggcatgatcgcaataatttcggcggctagtttgccatgaagatgacgataaatcagcattcacgcgcggtgagtgaggaaaaatacgtttaaaacgatcgattgtgctacgagtcgggtaaactgtaggaaaattagaaatagagacagataaatgaaaaagaaaacaacacttagcgaggaggaccaggctctgtttcgccagttgatggcggggactcgcaagattaagcaggacacgattgtccaccgaccgcagcgtaaaaaatcagcgaagtgccggtgaaacgcttgatccaggagcaggctgatgccagccattatttctccgatgagtttcagccgttattaaataccgaaggtccggtgaaatatgttcgcccggatgtcagccattttgaggcgaagaaactgcgccgcggcgattattcaccggaattgtttttggatttacacggtctgacgcagctgcaggccaagcaggaactgggcgcgttgattgccgcctgtcgccgcgaacatgtgttttgtgcctgcgtgatgcatgggcacgggaagcatattttgaagcaacaaacaccgctgtggctggcacaacatccgcatgtgatggcatttcaccaggcaccgaaagagtacggcggtgatgcggctttgttggtgttgattgaagtggaagagtggttgccgccggagttgacctgaatgctggcagcaaatgccggagcagcgtaaacgccttatccggcctacaaatatgtgataattcaataaactgcaattcacttcgtagatactgttatggcctgcaagttttttcctggtccggtttcccggattgcaggcatgccagacacagcgccgtcaggcgctgtttttttcatcccttccgcgatttttacgccgctaccggattatgccgtgacgcatcgaacggcacgcctgacttcagcactccatacgccacctgtgccagcttgcgcatcatcgcgccgagaatcacctttcctttcttgccattagccgccagacggtcgcggaacgcccgtccccactcagtcttactggtggctaccattgcgggcatatacaacgccctgcgaagcgacacatgtccggccttactcatccggctcgcccctctcacactgctacctgattcataacgccgtggtgtcagacccgcaaaagcggcgaactgtctggcatgggcgaagcggtccttcagaccgatataagccagcaataccgcagatgttttctctccgatacccgggatgctttccagcagtttcctgcggtgtttcatatccggatcatcgtctgtcaggtcttttatctgcttctcaagacgcttcagctctgcttcaagccacagaaggtgagcatcaatgctcggtctctggacttcccgcgccgtttcagtgcgattcagttcctgcgtgtgcatatctgtcagcgcctggtggcggactaccagggcacgcaacgcgcgttcaagcgggtgaggcgcttcccaggctgcagggcgcttctgacgacagaactctgccagcatgcgcgcatccacggtatcagtcttgttacgcagtccttcactctgagcgaaagctttacccagcgcaggattaatgactgacactatgtagccagcatcgtaaaggcactcagcgacaggttccatataggtgccggtcgcttcgatgcagatatgcgcatggtcaatcttgtgacctttcagccagctcaccagctcatcgtgccctttagtggtgttagcgaattttttggtgcgatgacgaccatcaggacgcaacacatcgacatccagtttctctttagcggtgtcgataccgatataatgaagttcatgttccatagtgaaaccaaccttgcaaatacggattaccgggaaaaccggtccatgatactgtccggtttatcactttgggagaaaggcagtccgctgcataaatctacgcaacaggttagaacccaaggcccgatacggcatgcggactgcaggcagagaaaactggccgattttctctgcactggagggataatacaaggcctgataagacgcatcagagcaatactacgaactacagttcattcaatacatactgaaaacgacacgtcgaatcaatcggttgcccactactggtattcacattcaccacaatatcgtgtagtactttatccgttaccggatgacgagttggcgtaaccgttaccgttgatttatcacaaccgtaagaggtaaaggttaacaattctgataccgcgcggcagtatgctcctctgccatcattatcagaaaaattactgccatcacagagtctgccgccttccatcaagtaggtcgaaagcgtggtggtcactgttgaccccgtggactgaattcgtaacgccttattatggctgacataattttcactccaggagatatcgtatgaagcgaccggtatcgttgggcatattgtgttatgcactgtaggggccgtatagcttccaaatccgggtaaatctgtataggaataaaaggatgcgatccaagggcaaccataatcatcagatgcaacggtaattttaaacgtcatatatgcacaacgaaaaattttcgtatctatgccagggcaatttgagttattaattgtatcaaagtcagtcagtaccaaagttggagctgaacccgacccagaccaggaaataacccgcaacgtatcgcctttatacgcaaaagaatcatatttcccatatgcaacctcctttggcgttatcaccgtaacattgaaaacactgctcgctacagcaccggttaccttgtccttggcataataaactctcacactgtcaaaactcgcactcataagtttatctccagcataactcttagatgcgccgacaacactcagaacgagcagcattaggctcgcgaaaattatggtccattttttcatttcagaaatactcaaaggttgccgtcactgtggcactaaagtctccggacgttacatctcgcccgctctttgcctgtaaccaggtattaaaatttaggctgttatttccctgattcagcgggagcgtgacgcctgttgtattgttgattggcaccgatgtgcctgccgcagtttcaataccaatcccagcgccggatgctgatgacgaggagtcaaaggccagaaagccgggtagagcactatcttctgttcctgtcaacgttactttgacattaaacaatgtagaactatgacaatctttcaattgaaacaccaatggcactcgctctgactgcccaaggttcattaaatcgctggcggcaatggcaggaaaatgtacttctgccaactggctaccattaatcactggcgtacacgatttactgattaaattgccggtaaagtgcaaattatctcctgctattgtggttccactgcccagcaacatcaggctactaataaaaaacaacgtacgctttttcttcattggtaatctacctgtaacgtggcccaggcctcaaagtccgcctctggcagaacgacaccactcttttttactggcacagccgttaacaccggtaaatcggtttcattcaccacaagtggcgtattgatcgtaaaactctgccctgcctgtttgagctgaatgcctaaaccagtgatattgctgcttactgcagcattatcaaaatcgcttggtgtgccactccagctcaaggtcatttccattaatgggtcgcgaaccgccgtatcgcaggtaatggaatacggcacggtttgctcataattgctgccattaatgtcatcaataagcacatcctgaaaagttatttcaatggtttgagcgttgctaatcgtgcagttaggtggctgcactaaataaccgtgaaaagagacgtttgagagtgccatcgagcaaaagccccacagcaaaataagcgagatccgtttcattggtaatccaccacaattgtggcactggcgttaaattcagctgccgctaacgttgtaccactctgtttcaccggcacagcttccagaacgggaactcccgaggaaaaattaaatggcaaccatgagccagaggttaagtcgagtattgtgtgatcactacttttctgaacccgaataccaaacccaggaatccccgtgctgataactgtttcaccgttaatcacgaccgttgtcgcctgcatctgtagacgcaggtcatccattgccagattgttacaaacaagcgagtagtcaatgggacgtttataatcaaccccattgatcttattaatgaatacattaccaaactcaactgccgcaccatttaccgtacaaggaggaggggcatcgacaagcacccgtaaattcatacttactgacttactcgctgcaactgcaaagccgctaccaacacaacatatcagtaacccagttaccgcccagacagaacaagatcctttcatactggctctcccggcctcagcctttgcggctctgctcttcatcgacctggcaactgttaccgttgcaagtgaaaaagagcggcatccgagcgccatagtcgttgacataggtcagtaccggcacgctacccatcttcacattcagcggtgcagaggttttcggcgacatcactattggcgagaaaccggctgccggattgccatttttctgtgtgctggcattactgaaaatgacgtaatacggtgtcgggttattgacggtaaattcctgaccgttgcgggttaaagtaaccttatattgccaggggtttttcatgctgacgttctccagcgccttcggtcgccagaacaacttaatacgcgtttgtagtgctatttgcagcgtgttggctttgtttgattttggcgggatctcacgcacgttgaagtagaacaggctttcacgatcggcaggcaatttgttgatatccggcattccctgcacttttacctgcccgttcatcattgaatcgatgcgttgcaccggtggcagaacagttaacggtgaactgatcttgttacccttttcatcttcgatccagctttgggccagataaggcagtttcggatcgttattgcgcaacgtcacgctgattgatttgtcgctttcattaaatatcaaacgggtacgatctggcgttacagaagcctgggcagacaaactggcagcgctaagcagtaacgctagcgtcgtagcacccaatttggcagagcaaagtaaatcagacatggatcattccttaatcacgttattggttagctgaaacagaaacagggggattggtgggtgtcacctgttgcgtctgctcctgaatgacaggctttatgtcatcaggaacaaccggcgcgacgttgcctttatgctggcatggcagtaacaagccgttaaacagatcggcaggcagcgggtccggcaggttgatatcgcaatgcgcaacaccactccagaacacactcatgtgttcgccaggtttcaccccagccagataaacattgccgtcatcatcgacaaggcccactgtctgctcgttatcattttttacttctgcgccaaacggaggatggctgccgtcttgtaaacgctgcaccgccatcgctttttgaccactgatgacggcaaatttgcggtagccaatggcaccttcagttagcgtggcttgcaccaccgactgggttgcttcagcgttttcaggcaatctgttgaggtcgatatacgcctgattgcggtaatagttattgacgtcagaaacgacggctttaccaaacatattggtataaacagcagccccgttaccttccaccggaacatcggcaacgccatcggcatcaatcaacaagcgtgtcccgcccatattctgggtacggtgaagtgcgccaccgtgggcagtaagcgttgcgccgccctgtaacgacaagcccgcagaggtgtattgcccttcatggtagttcgcactgaggtcaacctgcgccagcgaaccatcatgctgtaatagccgtcaacgctggtgtgtttgtcactggtgccgacgttcaactgatagtgagtcgcgtcatcgacacggctgaaataaccgacctgactgctgtccgtcccactgccatagttaccgttatagctaacggtactgttgtcgccccacggcatactgagcgaaatgtacatgcctttgtcggcctggttgtcatactcgtaacggtagccagtcatcgagatgctgacattacgaatactgcccatattgaaatagtgcgagagcatgatgttgtagtttgtctgctcctcgcgatcccagtaggtatggcgggtatagttgagataaaccgaaacacccgcatcgcggaagttctggttataagtggcggtgtacatctctttgtcgttgcccgtgcgtaccattccgctgtcactggcatccagatactcactcatggtcataaagttctcttccgagaagcgatatccagcaaaagtaacgcggctgttgagctggtcaaagtctttggaataactcacacggaaggagttaccgtccagcgaacctttgccataagcggtgtctttatccagtttggtgtgcgagtgagtaacatcaaacgcgaccgcgccgaatgtagacaaatcgcgaccgacgccaagcgccgcagactgatagttttcatctcccagtgcgccgccatataacgaccagccgttagcgatcccccaggaagcttcagcaccagaaaaaaattcaccctcgacatggtgtccccactcttgcggacggcccatcatgatcttatagcgaacctgacctgggcgagtgaggtatggcatcgaggcggtgctgatgtcatattcctgcacctggccgttctgttcttcaatgcgaatatgcaacgtaccggagacagaatcaccaagatcctgaatacgaaacggtccagccggaacctgcgtttcgtaaatcacacgccccatctggctgacggtcacttttgctgtggtgtgtgccacgccggaaatgtctggcgcgtagccgcgcagattgggaggcaacatttgatcgtcagtactgacactgccaccaacatagttaaaaccatcaaaaatatcggatctgaggtaatcctcgcccagcgccagtttggcttttaatgatggtaacgcccgccaggcatagtagcgactccactcccatttttttgagtttcatcgccgctgaattcatcgtcatcattactgcgagtatgttgatagttagtctgccagtcagcacgcatacgccacggccccaggttaaccccgaccgtcccgttgccgctgatctcgttactatcatcaccgccattttcttcgtgccgggtttgtgcgttgatgctgtagtccgcgacgatcccggagatgccgtcatcccaacgtgaaggcggatcccagtcgggataagtatattcgaggtaagcctgtggcagtgaaatgactaatgcggactggcttaaatcagccttaatttccatgccttccagttgaccggatttcaggcatttagcatcgtggctccattgcagattgttcgccacgtcttcttttaaaccaaactgcgctaccagttccggtgtcagacaagcatagcttttgctcgcgtcatcttcaccagcataccagtaaatatcgtactcttccgccaatggctgtttatttagttgaacctgtaaattgtattttccgggctcaacatatccctggctggaaaaacgcttcagatcaatttttgtgtcgccttttaattccagaaaacgggaatcaaactgaatgtcgtcttcagcccagacactgctataactccctgacattgccagcgcaatgcaccacggaagaatccgtaatcgaaaaagagaatggtcaggcatacacgtttctatccgtttttattcttgttcggtcaaaatccatttaaatcccccatagcagtgtcgctatgggggtatgccttacaggtaagtaatctggaaggtggtatttgcttcgaaattacccagatctggcgcatcagctgcgccgaccagccaggctttaaagttcagtgtctgcttcgctttgcctttattggtagaagtgtctttcactattttctggtcaatacccatgccgcttttgtaagaggtacccagagagtcaccgatcgccaggctaacattgttaaatgccgcaccggtatcggtattgaaaatggtgtaataattgccgctatttgcagaagaaacggtaccagtaaaggtagtggtcattgtttcctgagtatcaaatacgcaatcttgcagacgaatctggaaacttttcggcgtggtggtgccgttatttttcagtttttcggcaccgatatcacccatatcaacttccagtttgtgatcgtccggaacgatagaacacactgagtcttcaatggtgccgtaaaaacgtgcagtaccgttgttacccgcagcgattgttgccgtagaggtgaaaacgcccatcaccattgccgcagcaatagctgttttaacaaacttactcattatttgtccttaaactataaataattaaaaatataaacattacaatacattgattcagtcaatacccaatgtttatacccagccattgaatacggcatgcgatccaaaaagaacaggtcgtagaaaattgtattctttggtgtggggccgcatagtgatgttttcacccccctgatgcaatttaattttactaaagagtaaatgtagatttaattaatatattgacagaagaaaggttatcttaaggacatccttaaaaaatacggaataagtanttagnaaaaatagaaagtatatcaataatgaatatcaacagcttaaaaaacaaacaatgaacatataatgcgattggcatttatccacttttgacaatataatatataaacactatagccagaatttaatcaagtttcaattacatcctgcctgattattcaactctattatctgtattaataaatgacaatgagtgtcaaacagacattattcatttcaacatgtaactttgggcaaaatcaagatacgcgcagaagaataatttccgaatgaatgtagaaagtgttttatttatagataaggagagtcttcgatagtagtgaggttgacagatatccgctgcctgatgagcaattatgcccaatgaatctacctcattgggcataatttggaacacatcagatagcttttgccatcttcagattacacgggctcatctgccagttgaatgtaccgtttccgctttcatcaagcgttacgctggcaatggccgaggtggtaaacataggcggcgtttcgcccggacataactcggcaaccagatacccgactaacggtaagtgagagatcaccagtaccgaagcaacaccttcattggtcaacgcctgcaaataggcactgaccagaccaacatcgccgcagggcgttaactccggcagaacttctgcactggaaggcaggttcagacaatcccctacttcttccagtgtttgctcggctcgcaggaacgggctcaccagaacgcgttcgatttccactttttgacctttcagccagttcgccatcaggcgagattcgtcacaaccattagtggtcagaggacgaacggaatcactggcggcatcgagggctgcgtcgccgtgacgcatgataaaaacttgcatattgcaccgcttttgttaaccagattcgcccgttttctttcatctgaaaccagagaaagaaaacggtggccggcattgtgccttatccattcaccgaatgaaacgctgttttttacctcaatggcgtaagtatagtcaatatgcgtttacattttgaccaacactccgccattcagcgcggattcatatagctttgaccttcttattgcaggtcagttgcagttgttttccaaaaactttccccacgcgcgcccatctcgaccaaacgctcgcaaggggtaaaacgggaaccatactgcgtggcaagtcgttgcattattgcaaccacttcgcccgcgccgagagaatcgatatagcggaacggtccaccgagaaatggcggaaaaccaatgccaaataccgcaccaatatccccgtcacgcacgctacggataacctgctcatcaacacaacgtactgcttcattcagcatcaacatcacacaccgttcagcaacctgcggtgcggagagtcgcccctgcccttgtgcgccaatgagcgggtaaatggcgggatcgacctgttttttgcttttacgccctttctgaccataaagatagaaaccccgaccattttttctgcctttgcgatcgtcgttcaaaattgaagaaacaacatttgcaggcgcgctaaaacgttctccataagcggcttccagtacaggaataattttagtcccggtgtcgattcctacctcatccaaaagttggattggacctaccggaaaaccaaatttcactagcacggcatcaatgtgctctacccgttcaccttcggtcagcatgcggatagcttcattaatgtaaggcgctaagatgcgattgacgtaaaacccggctttgtcacgcacgacaatgggcgttttgccctgttttttcgccagttttaccgtagtggcgatggtttgcgctgatgtacccgcatgaggaataatctccaccagcggcattttttccaccggactgaagaaatgcaggccgataacttgctcaggtcgcgtggcgtgagcggcgatatcaccaatcggtaaagatgacgtattcgaagcaaagatggtatgagcggcgctattttgctcaacttccgccaccatctgttgtttcaattcgagattttcaaacaccgcttcaataatcagatcgcgatgggcaaagccgcgatagtccgtcgttccggagattaatgccagctgtttgtcacgttcgctggctttgagatgacgacggcgaactttgccctccagctgatcccaactgtacttcagcgcatgatttatgccctgcgggttgatatctttaattctgaccggaagccccactttacaagcagtgacataagcaataccgccgcccatcaagccaccacctaaaattcccacgctgtttaatggcgcaggcggtgcatcactaccgggatctttcttcacgtccgtactggcaaaaaagatactacgcagcgcctgcgattgtggcgtcatcgccagttcgccaaacgcccgagcttcggcgtcataaccgctgctggtgccctgcgctaatcccgtttcaacaacctccaggatgcgttctgtcgccggataattgccttgagttttgtgttctgttttcttgccgaccattttgaacagcagcgcacgacctaacggccccgccagaatacgctcgcgtacaggtagagggcgggaagatgggcgatccttcttcgccagctcaacagcgacttccagcaaaatggagtgcggaacaacgtcatccaccagccccagctttaatgcctgtttcgcccgaagttgttttccggtgaggatcatctctaatgctgtgctgacgcctatcagacgcggtaaacgctgggtgccgcctgaaccgggtaacaatccaagttgtacttcaggcaaaccgagcaccgttttaggatcgtcagtacaaacgcgaccgtggcacgccagcgccaactccagcccaccacccaggcaagcgccatgaatagccgcgataaccggaatgggcaaagcatgaatctccgccatcaactgttggccctgccgcgccagtgcttccgcttcttgcgccgttttgcagttgccgatcatgttgatgtctgcgccagcaatgaagttgtccggtttagcggagacaaacaccacgcctcgcaactctttgttttcacggagttgcttaataatggcgcgcacctgcgaggcaaactccgccttcagggtattcattttctcacccggtacgtcgatggtgataacggcaatgttgtccagacgaacattaagggtaaacgctgatgtcatttccattattccgcctccagaaccattgccgcgccaagcccaccggcagcacaggcggtaactaaaccaaatccaccgccgcgacggtgaagttcatgcaatgtctgggtaatcatccgcgcgccggtcgccgcgaagggatgcccgtaagcaatcgaaccgccaagcacgttaaatttgctatcgtccacttcgccagtggcatgtgcacgccccagtacttcacgagcaaaacgttcgctgcccagcaactgaatattcgccagtgtctgagcggcaaaggcttcgtgcatatcgatcaatgtcagatcgctcatcgtcaaaccggcacgctccagcgccagcggtgttgaccaagccggaccgagcaacatgtcctgccagacatcaatcgcagtaaatgcgtagctgcgcagataccccagcggcaccagccctaattctttcgctcgggattcagtcatcaggatcaccgctgccgcgccatcggtcagcggcgtactgtttgccgccgttaccgttccgtgtttacgatcaaacgccggacgcagctttgcgtaatcggcaagcgaggaattaccgcgaatattgttgtcttcgacaagcggttgtttataaggagggataaaggcagtcatcacctcttctttgagttttccgtctgaccatgcctgagcggcacgctgatgcgaacggtgcgctaatgcatcttgctgttctcgggtgatgccgtaggttttcgccatttgttcggcggtgtcgcccatccgcaagccagtagaatattctgctaccgcaggcggtacgggcattaagtcgcgcaaacgcaggcgagagaagagtttcaggcgctggctcatggttcgagctttgttgacatcaaccagcacgcgcgccagttttttactgacgccaattggcaatacggaagaggaatctgccccaccggcaatccccgctcggatagttcccgccatcaggctttctgcgacgtttgcaaccgcctggaaactggtagcgcaagcgcggctgacgctgtaagcatcggtatgcacattcattccggtaccgagaacaatttcacgcgcaatgttgggggcttcaggcatttgtacgacctgaccaaagaccagctgttcaatcacttcagcggggatctcgctgcgtgccagcagttcgcctaccaccatcttccctaaatcaaccgcgggaatgccatgaaaagccgtcccctggcgggcaaaaggcgtacgtaaaccgctaacaatggcgatacgatcgccctggcgggtaaccagcggtaaaacctgacccataacactcccctgtaaaaaataaataaagtggtctgacctgatcatagtcttaaccatttttttacatttagccaaacggagaaaaaagaaagtgggagctatgacacagtgaagacaggagaaagaaaagaaaacgcccctgccagcaactgacaggggcgaacgtacccgagaggaattaacgcagacccagctggaagatcagcatttcagcttcgcaggcaaaagtgaaatcgatatccaggcgcacaccgtcagactcttcagtgaaagtcggggagattttgcacggttcggattccacgctacgggctttttcagtcagcgccgccagcgtttgttctgcttctgcgcggtttgcaaacacgcggctgtaagacgcggtgcagtcggagttgtccataatggtgccaacatccatacagcagcaaaccggggtttcatcagcactacatttactcatcgttgatttcctctgtatgtgcacccaaggtgccagataaacgttgtggatattttacgcttccggaaagtgctgctccagttgttaattctgcaaaatcggataagtgaccgaaatcacacttaaaaatgatctaaaacaaaattcacccgaatccgcgagtgcgcaacctccaaattttgccagctggatcgcgtttcttagatcatatttgaaaaaagatggaaacatacttgcaacattccagctggtccgacctatactctcgccactggtctgatttctaagatgtacctcagaccctacacttcgcgctcctgttacagcacgtaacatagtttgtataaaaataaatcattgaggttatggtcatgagccagaaaaccctgtttacaaagtctgctctcgcagtcgcagtggcacttatctccacccaggcctggtcggcaggctttcagttaaacgaattttcttcctctggcctgggccgggcttattcaggggaaggcgcaattgccgatgatgcaggtaacgttagccgtaaccccgcattgattaccatgtttgaccgcccgacattttctgcgggtgcggtttatattgacccggatgtgaatatcagcggaacgtctccgtctggtcgtagcctgaaagccgataacatcgcgcctacggcatgggttccgaacatgcactttgttgcaccgattaacgaccaatttggttggggcgcttctattacctctaactatggtctggcaacagagtttaatgatacttatgcaggcggctctgtcgggggtacaactgaccttgaaaccatgaacctgaacttaagcggtgcgtatcgcttaaataatgcatggagctttggtcttggtttcaacgccgtctacgctcgcgcgaaaattgaacgtttcgcaggcgatctggggcagttggttgctggtcagattatgcaatctcctgccgggcaaactcctcaagggcaagcattggcagctaccgccaacggtatcgacagtaataccaaaatcgctcatctgaacggtaaccagtggggctttggctggaacgccggaatcctgtatgaactggataaaaataaccgctatgcactgacctaccgttctgaagtgaaaattgacttcaaaggtaactacagcagcgatcttaatcgtgcgtttaataactacggtttgccaattcctaccgcgacaggtggcgcaacgcaatcgggttatctgacgctgaacctgcctgaaatgtgggaagtgtcaggttataaccgtgttgatccacagtgggcgattcactatagcctggcttacaccagctggagtcagttccagcagctgaaagcgacctcaaccagtggcgacacgctgttccagaaacatgaaggctttaaagatgcttaccgcatcgcgttgggtaccacttattactacgatgataactggaccttccgtaccggtatcgcctttgatgacagcccagttccggctcagaatcgttctatctccattccggaccaggaccgtttctggctgagtgcaggtacgacttacgcatttaataaagatgcttcagtcgacgttggtgtttcttatatgcacggtcagagcgtgaaaattaacgaaggcccataccagttcgagtctgaaggtaaagcctggctgttcggtactaactttaactacgcgttctgataacacgttcgcctggataaagtcacctgcatagcaggtgactttaactcccccacttcaccgaaagtagtgtcctcattgcttacctcctgagttttgcaaacagcctgatggcagcttgccctttcaaatcaataagcggtatccacagacaaatctgaagggaaaggcatattttcaggcgttctgctcgtccttctcaaagagtttacttttctgaatttccaggatactcaccccccctggctattgtgcgctcatacactcaaattaaagataggttctaaataaatgagcgttttttgatagtctatttcattaggtaatatatatttgtaacaaatcaatcaaaatggaataaaatcatgctaccatctatttcaatcaacaataccagcgcaacttacccagaatccattaatgaaaataacaatgatgaagttaatggattagtacaagagctcaaaaacctttttaatggtaaggaaggaataagcacctgtattaaacatctacttgagcttataaaaaacgccatacgagtaaacgacgatccttatagatttaatattaataattcctcagttacttatattgatattggctccaatgatacagaccatattactattggtatcgacaaccaaaaaccaatagaattacctgcgaactataaagacaaagaactcgtccgtactatcattaatgacaacatagttgagaagactcatgatatcaataacaaggaaatgatcttcagcgcattaaaagaaatatatgatggagatcctggttttatcttcgataagatatcacacaaactcagacatacggtaacggaatttgatgagagcgggaatagcgaaccaacggacttatttacctggtacggtaaagataaaaaaggcgactctctcgctattgtaattaaaaataaaaacggaaatgattacttatctctcggttactacgatcaggacgactaccacattcaaagaggaattcgtattaatggtgatagtctcacccaatattgtagtgaaaaagccaggaatgcttcagcgtggtttgaaagcagtaaagctatcatggcagaatcatttgcaacaggttccgatcatcaggttgtaaacgagctcaacggggaaagactgagagaacctaacgaagtttttaaacgtttaggtcgagcaataagatataattttcaagtggacgatgcaaaatttagacgcgacaatgtaaaagaaataatttctaatttattcgctaacaaagttgacgttgaccatcctgaaaataaatacaaagactttaaggatctcgaagataacgttgaaaaaagacttcaaaatcgccaggcgaaatatcaaaatgaaattaatcaactatctgcgccaggtgttaattttgatgatatttaaaattatttttccagttttttgatttttcaacgcctgaatatcggaaatagtcagtgacgaacatcagtatttttacatcattacgtccgggtcattgtcggtttatctccttttacttgtggtaattgagggataacaacaaaaaaggtgagttttgcgactcaccttttttatttgtttcttattcagaatcaatatcttttaaatcatcctgaatcgcttgtgcgttcggattttcctgcggtttgagttcgccgccattagcgatgaaatcatgacgctggaagtacgcttcgcgcaccataatataaggatcggacgactgacgcagcagaccatcggaatccagcagctgagcgcgggtttcgatcccttcaagcgtccatttacccacagacatcggccaggtcagccaggaaagaaccgggtaaagaccatccgccatatcaccaccgtcatcacgcagcgtgaagctaccgtagaacggtaactggacgtaaggcccataacccacgccataatgaccaagcgtactaccgaagcggtgaggttcagtccgttgcagtttcgggttcgccatccctgcaacatcaataaaaccgcccatccccaaaatggtgttcaggaaaaagcgggtaaagtggaccatcccctgataagggtcgccctgcaagaagtagttaaccatcaccgcaggttcttcaaggttgccagtaaagttgctcaaaccgttacgcgccggttgcggaacataatcacgccaggcgacagcgaccggtcgaacaatatacgggtctaatacattgaagttgaagttgtacatggtgcggttgaacccttctaacgggtcagaacgcccttgctgatctgtaccggaactcgcacaccccaccagaagcgtagttcccagagcaagcgccgacaggcgaagcttcataaatgtctccctgttttttatggcttatgcagtttgccatccatgacggaacgataccgtatccgcctgtttaggtgtgggcgattgtaacagcacgtcaactgatgtccagacgccctgatttgctgatttgatcatagcctggtaatcgccgccctgtaggctacttgattctatagaaacagaaaaaggcaaacgcagccttttctacattttcagagtaactcccgccagttgcgagcaaaaaagccgctacgctttagctatacgtgctaattcaagagaagagaccatggacaacgacaaaattgatcaacacagcgacgaaattgaagttgagagcgaagaaaaagagcgcggcaaaaaaatagaaatagatgaagaccgactcccctcccgggcgatggcaattcatgagcatatccgccaggatggtgaaaaagagctggaacgcgacgcaatggcgctactgtggtcagccattgcggcgggtctgtcgatgggcgcttcgctactggcaaaagggatatttcatgtcgaactggaaggagtgccaggcagcttcttactggagaatctcggttatacctttggttttattatcgtcattatggcccgccagcaattatttaccgaaaacaccgtgactgcggtactacccgtcatgcaaaaaccgacaatgagcaacgtcggcttacttatgcgattatggggcgtcgtgctgctgggtaatattctcgggacaggtattgctgcatgggcatttgaatatatgcctatcttcaatgaagaaactcgcgatgcatttgtcaaaatcggcatggatgtgatgaagaacacccccagcgagatgtttgccaacgcgatcatttccggctggctgatcgccactatggtttggatgtttcctgctgcgggtgcggcaaagattgtggtgattatattgatgacctggcttattgcactgggtgacaccacccacatcgttgtcggttctgttgaaatcctctatctggtgtttaacggcacgctgcactggagcgatttcatctggcccttcgcactacctactttagcggggaacatctgcggcggcacctttatcttcgcgttaatgagtcatgcacagattcgtaacgacatgagcaacaagcgtaaagcagaagcacgccaaaaagcagaacgtgcggaaaacattaagaaaaatgataaaaacccagcataaatggcgagggtttaagcaatcgagcggcagcgtacttaccccgcagtccattagcgggtatactcatgccgcattgtcctcttagttaaatggatataacgagcccctcctaagggctaattgcaggttcgattcctgcaggggacaccatttatcagttcgccaccatccgtactagtccgcaaaatcccctgaatatcaatccttccgtatattcacggttcgtcatggttcgcgtcagatcgttgacagccgcactccatgacggtaaaaagtggataaaataattttacccaccggatttttacccatgctcaccgttaagcagattgaagcagcaaagccgaaagaaaaaccataccgcctactcgatggtaatggcctgtacctttatgtccctgtgtcagggaaaaaggtatggcagcttcgctacaagattgacggtaaggagaaaatcctgaccgtaggaaaatatccgctaatgactttgcaggaggcaagggataaagcatggactgcgaggaaagacatctcggttggcatcgatccggtaaaagcgaaaaaggcttcgtctaacaacaattcctttagtgcgatttacaaggaatggtacgagcacaagaagcaagtctggtcagtaggctatgcaactgaacttgcaaaaatgtttgatgacgacattttacctatcatcggcggccttgaaattcaggatattgagccgatgcaactgctggaagtaatccgcagatttgaagatcgcggtgcaatggagcgagccaacaaagcccgcagaagatgcggcgaggttttccgttacgctattgtcactggtagggctaaatataacccggcgcctgaccttgctgacgccatgaagggataccgcaagaagaacttcccgtttcttcctgcagaccagatccctgcattcaacaaagcactggcaacattttcaggaagtatcgtatcgctcattgccaccaaggttttacgctatacagccctcagaacaaaagagcttcgttccatgctatggaagaacgtcgattttgaaaacaggattatcaccattgacgccagtgtgatgaagggacgcaaaattcatgtggtcccgatgtcagaccaggtggttgaacttctcactacgctaagctcaatcaccaaaccagtatcagagtttgtttttgccgggcgcaacgataagaagaagccgatctgcgagaacgcggtgctgcttgtgatcaaacaaatcggctatgagggtctggaaagcggtcacggattcaggcatgaattcagcacgattatgaacgagcacgaatggcctgctgacgctattgaagtgcaactggcacatgccaacggcggatctgtgcgcgggatttacaaccatgcacagtatctcgataagcgcagagaaatgatgcagtggtgggcggatggtttaatagtttaatagtttaatagtttaatagtttaatagtttcagtccaatattacattttagcattgcaaacaaatattcactcacgcaacggttaattaagaagcaaccaagtaatcttagtgatgatgtttcagaatgatgagtaacaaatcgttaaatcaagtattcgatgctagtgttttgagcctctttagctgatattattgtcgtttactctactttacattgaattgtttgatgaccatgactacacgatatagatctgatattgatggcctacgagcacttgctgtccttcttgtttttgcttatcacctcaagctatcaccttttagtggcggctttattggtgttgatgtcttcttcgttatctctggatttcttatcactggtattgttataaaagctattgacagaaatagtttctcattatctgacttctttaacagaagaataaagagaatagtaccaaatgtttttttagttgcatcttgtacaattatagccggatggttcatcctattaccaaaggattattcttcacttattagtagctatttgtacacatccatctacgctgctaacttttatttttggaaagcgacaggagcttattttcatcttctgcagatgagatgccactacttcatatgtggtcattggccgtagaggagcaatattactttatatggccaattattattttacttgcactaaagcacattaagacaaaacatattggtgttattacattaataatttcagtatttgcctttatattctctgaaataatggcaaggcgttacgctgggttctcatattatatgccaatcacacgctctggaggcttgcttctagggtccgccctagcattaatgaatagagattataaaaaaataagggagtttaattcttacatagtagtaatattaggaactattcttattgcggcatcatctgtaacagtgaacaaattatcagtgtttcctgggttaaattctgcgataccatcatttggtgcaatgttagtaattttaggggggaacgggtttaatggcaatgtgatatcaaaaatctatggttcaaaaataatatccacaattggattgctatcattctcaatatatctttggcactggccgttgattgcatattcaacatatatgggagtgatagactcacttgaagtcaaattgacaatagtactcctgacatttattttatcatatttaagtttaaaattcattgagaatccaataagaaaatcnaaaatatcatttgttcgttcttttatttttattaacacattttttattgcaactgcttttattgtgttgtttatgtcaactataacaaatggcttcaaattcagaagtgtaggagaaaatcataatttagatgtgaaatatgctggaatggacgaaggatggtgtcatgttagcgcagaaggaaaaaatggcataacttttaatgagtctatggccaaatgttatataggtgataaaacatcaaataaagaagctctatatattggtgattccaatgcagggcattacggtccatttgtagatgaaatgggtcgcagggctggaataaaaataaatcaactgagcacttcatcttgttacccaacaagagaagttaagaaagatggagaaaaccctgatgtctgcataaacttcagaagaataattaatgaaaaataaaatctggtaaatatgatacaattatcattgctaatagatgggcaagggatgataagaatatgtcatataaaaacgctaacttcaccgagttcctatcattttactcatctcacgcaaagaaagttattattatggatcaaatgcctgagtgggtaataaatcccgctgcctgctacgagagaggaacatgtgatgctgaaactaattttgatctagcaccaggattggatgagtcgcgtaaaaaaatagaaagcgcagcatcacattttaataatgtttatcttgttgacccgtactacctaatgcttaagaataaaaaatacacacctttcgcaatgggataccctatgtaccatgacaatggtcatttaagcatcaatggaatgatgtggattgcggaaaaatacttgcaagataataaaaacccacttgaagattaattgagttataatttttattggtaatatgaacctcttaatttatgagaggttcatattttcattgaaatatttaattgtgctccttagcaaagcgcaagctacctgcgcttaatactgcagataacgtatctcccactctagtcacacttaagttgctagttcctgcaatgtaactaacagttgtcgttgttgccagtgtcataactattggtatagttatgactcgttctgtacctccgctatcaacaaactgaacagataaaaactgaaaccttctatttattttatatgaaaatgataatccagatatggataataaaccactttgtcctatttttatattccaatcagaaaaatcagttatgttagatgggtctatattattttgcgagtaccatgatgttattgcgcctgatgatgtttttcctttaaaataaacaaatgaactacttgcttttttaaaattattatcacatatgataaccacctcttgagttgatagtttagtttcatcatagaatacgctggtaagtactgcgtcatctgcgttaacaccccgtatctcagaaatcttagtcacaccagccttgtcagtgtcttccgctttgtttatgagagagtctgtattgtttacccacgcagacagcactctagccacaggggtgttatactgacgcatcaattgcgaaacaccagagataatacctgcctttaaagtgatttcctggcaattgttgccgtaagcaaggattggtttattcaccccatcccatctataattgccaacttcaacatcaattcgtccaccactgcaccatacaacagcatttgtttgtcctccgtcaaacttaaccccataaacagcaccaactttaacaaaagcgtagcgttcggcgtttattttcatttgaagcgggttgttgctggttcccgtgacgtacccaatatctatacggcaattatctcctgcgccatctacgttaatgccgcggtggtcagatccaataaccccgccagagccgacaacgctacagttttcacaagtaaagaaaccaatagggttgttgttgtgcggtttagaatgaatggagttatattctgtacctatcttgccgttaagaatgtaggtaacatttttcataacagctgtaattgtgtagttattgccatcccaaaccgttgcatcagggttaagaaaatgtgcaaaggaccacatacccccggagtttaaccccataatttctggccctaccgtggggtcatcgtaacgccccataactgtaaccccagcttcgtggtgtatttctatattatctcgtaatggatgaatagagccaagaacataaaaagtacctgttgcaccatattcaaatttactgaatcttgtgtctcttaccagtttttgaattacattacggttatgcgcggcgtttagcggaacatattcaccttcaataatgccagcggaagcgaaattaggcgtcattaaaataagatacccaccaactgcagaaatataaaatataggtgactgtggtttttcagttgtaaacacccaatctgttacaactggaacattataataataagttctaacctttttcccatctgttaaccctaatattgattgggcctgttcaacggatgagcattcgagaatagcaccaccaacgataatgactcctgcgctcccctgtaattcttgccgtagctgatcaggatcatacttcaacacattcggaaaatagaactgctgcgaaccatacgcatcataaacagccatagaatggccttgcacagttacgaacttggcaatctgtccgttatatacaggataaccagcagcgttaatgatgattggttgcgaaacaggaacgtgagagccgtcttcgttctccacataaacctgaatctggttttcaggatttaccgggtcagtgtcaattttaccgatataaattttgccattggcaaccgctttaaaagaacgcgccatagtgaagagttgcgaaggcatgcttaccacaacatttgcggtgatatctgtcatttaatttgctccagatacaaggaatcgccgcagcatggctacggtgaattttgggcataaaaaacccagccgaggctgggtcgttgcgttggttatctgtcagtagt

SEQ ID NO: 187 - DNA, 216 bp, Escherichia coli
tcgcaccagacgttccgccactaattgctgtctgaagacttgatggtttgttggcattagcagcggcaagagctgcgctttgctgtgcaatgcttgctcatgttgttggcgtacgtctgcccggcgtttgcctgaccttgcagagcaccaagcccaacgtttgccagattgttgtaattgctcatctgatttgataaccaagactgaccgagtgtc

SEQ ID NO: 188 - DNA, 436 bp, Escherichia coli
ggagtgactattaaatcttgcacgacgtctgagccaccggacatcccacaggtgagacgtataattgaaggtttttacatcagattcgttggggattggcctgggtttatttcgggagcgtttcgttggaaggtaattgcagttttcacagactatatcggtaatgcttcgtcgctgtcgtctcattcatacctcctgtcggtaaatctgacaccctgctccacagcccaggaagttgtgtactcaatcaggcttgccatacgcttcacgctcatctgcgcactgctttcgcggatattgacgtattcaccttcaagacctggcaaaacatcagcttcctgttttgtagccacggcatgaccgctgattaacaaaactttccactgttctggttttagccatctgccgcaccactgaacctgtcgggagatatcag

(The sequence listing continues in the following parts.)

What is claimed is:

1. An isolated nucleic acid sequence having nucleic acid sequences comprising SEQ ID NO:1, SEQ ID NO:2, SEQ ID NO:3, SEQ ID NO:4, SEQ ID NO:5, fragments thereof, at least 25 contiguous nucleotide sequences thereof, complements thereof and sequences having at least 90% nucleic acid sequence identity thereto.

2. An isolated nucleic acid sequence having a nucleic acid sequence of any one of SEQ ID NOS:6-47, SEQ ID NOS:79-82, SEQ ID NOS: 90-88, fragments thereof, at least 25 contiguous nucleotide sequences thereof, complementary sequences thereof and labeled derivatives thereof, complements thereof and sequences having at least 90% nucleic acid sequence identity thereto.

3. An isolated nucleic acid sequence having a nucleic acid sequence of any one of SEQ ID NOS: 48-68, SEQ ID NOS:83-89, SEQ ID NOS: 100-104, complementary sequences thereof and labeled derivatives thereof and sequences having at least 90% nucleic acid sequence identity thereto.

4. A method of detecting the presence of E. coli O104:H4 in a sample, comprising:
detecting the presence of at least one target nucleic acid sequence specific to E. coli O104:H4 in the sample, wherein detection of at least one of target nucleic acid sequences confirms the presence of E. coli O104:H4 in the sample and the absence of a target nucleic acid sequence specific to E. coli O104:H4 is indicative of the absence of E. coli O104:H4 in the sample.

5. The method of claim 4 comprising detecting the presence of two or more target nucleic acid sequences specific to E. coli O104:H4 in the sample.

6. The method of claim 4, wherein the sample is a food sample, an agricultural sample, a produce sample, an animal sample, a clinical sample, an environmental sample, a biological sample, a water sample and an air sample.

7. The method of claim 4 comprising the steps of:
a) isolating nucleic acid from a sample to obtain sample nucleic acid;
b) hybridizing the sample nucleic acid with at least a first pair of polynucleotide primers specific to bind to a first target nucleic acid sequence specific to E. coli O104:H4;
c) amplifying the first target nucleic acid sequence specific to E. coli O104:H4 under suitable amplification conditions to obtain a first amplified target nucleic acid sequence product; and
d) detecting the first amplified target nucleic acid sequence product wherein the presence of the first amplified target nucleic acid product is indicative of the presence of E. coli O104:H4 in the sample and absence of the first amplified target nucleic acid product is indicative of the absence of E. coli O104:H4 in the sample.

8. The method of claim 7, further comprising repeating steps b) through d) using a second pair of polynucleotide primers specific to bind to a second target nucleic acid sequence to E. coli O104:H4; amplifying the second target nucleic acid sequence specific to E. coli O104:H4 under suitable amplification conditions to obtain the second amplified target nucleic acid sequence product; and detecting the second amplified target nucleic acid sequence product, wherein the presence of the first amplified target nucleic acid product and the second amplified target nucleic acid sequence product is indicative of the presence of E. coli O104:H4 in the sample and absence of the first amplified target nucleic acid product and the second amplified target nucleic acid product is indicative of the absence of E. coli O104:H4 in the sample.

9. The method of claim 4 wherein the target nucleic acid sequence specific to E. coli O104:H4 is SEQ ID NO:1, SEQ ID NO:2, SEQ ID NO:3, SEQ ID NO: 4 SEQ ID NO:5, a fragment thereof, at least a contiguous 25 nucleotide sequence thereof, a complement thereof, or a sequence having 90% identity thereto.

10. The method of claim 9, comprising detecting an enterohemorrahagic strain of E. coli O104:H4.

11. A method of distinguishing an E. coli O104:H4 from a non-O104:H4 E. coli strain comprising: detecting at least one of a nucleic acid sequence having SEQ ID NO:1, SEQ ID NO:2, SEQ ID NO:3, SEQ ID NO:4, SEQ ID NO:5, a fragment thereof, at least a contiguous 25 nucleotide sequence thereof, a complement thereof, or a sequence having 90% identity thereto, wherein detection of at least one of these nucleic acid sequences confirms the presence of an E. coli O104:H4 strain and the absence of detection confirms the presence of a non-O104:H4 E. coli strain.

12. A method of detecting the presence of E. coli O104:H4 in a sample, comprising:
detecting the presence of at least two target genes of E. coli O104:H4 selected from a shiga-toxin encoding locus Stx2, an O104 antigen encoding locus, a fliC_H4 locus encoding a H4 allele of the fliC gene, and a terD tellurite resistance gene comprising:
detecting the presence of at least one of these target genes by using probes and primer sequences comprising SEQ ID NOS: 69-89 and SEQ ID NOS: 105-107.

13. A method of detecting the presence of E. coli O104:H4 in a sample, comprising:
detecting the presence of at least two target genes of E. coli O104:H4 selected from a shiga-toxin encoding locus Stx2, an O104 antigen encoding locus, a fliC_H4 locus encoding a H4 allele of the fliC gene, a terD tellurite resistance gene and a AAF-I locus which encodes aggregative fimbriae, comprising:
detecting the presence of at least one of these target genes by using probes and primer sequences comprising SEQ ID NOS: 69-89, SEQ ID NOS:90-104 and SEQ ID NOS: 105-107.

14. The method of claim 17, comprising detecting an enterohemorrahagic strain of E. coli O104:H4.

15. A kit for the detection of E. coli O104:H4 comprising:
at least one pair of forward and reverse PCR primers operable to hybridize to and amplify at least one target nucleic acid sequence specific to E. coli O104:H4 under suitable amplification conditions to form an amplified target nucleic acid sequence product;
optionally at least one probe operable to hybridize to and detect the amplified target nucleic acid sequence product; and
one or more components selected from a group consisting of: at least one enzyme, dNTPs, at least one buffer, at least one salt, at least one control nucleic acid sample and an instruction protocol.

16. The kit of claim 15 wherein the primers comprise nucleic acid sequences of SEQ ID NOS: 6-47, SEQ ID NOS: 69-82, SEQ ID NOS: 90-99, SEQ ID NOS: 105-106, complements thereof, fragments thereof, sequences comprising at least 90% nucleic acid sequence identity thereto, or labeled derivatives thereof; and
the probe comprises SEQ ID NOS:48-68, SEQ ID NOS:83-89, SEQ ID NOS:100-104, SEQ ID NOS:107, complements thereof, fragments thereof, sequences comprising at least 90% nucleic acid sequence identity thereto, or labeled derivatives thereof.

17. A method for detecting an outbreak specific strain of E coli O104:H4 referred to as LB2266992 or strain TY-2482 and not detecting a HUSEC41 strain comprising:
a) isolating nucleic acid from a sample to obtain sample nucleic acid;
c) hybridizing the sample nucleic acid with at least a first pair of polynucleotide primers comprising a forward primer having SEQ ID NO: 25 and a reverse primer having SEQ ID NO: 46;
d) amplifying the first target nucleic acid sequence to form a first amplified target nucleic acid sequence product; and
e) detecting the at least first amplified target nucleic acid sequence product,
wherein detection of the at least first amplified target nucleic acid sequence product is indicative of the presence of E. coli O104:H4 strain referred to as LB2266992 or strain TY-2482 and is indicative of the absence of the HUSEC41 strain in the sample; and
wherein the detection may optionally comprise using a probe having SEQ ID NO: 67 to hybridize to and thereby detect the first amplified target nucleic acid sequence product.

18. A method for detecting an outbreak specific strain of E coli O104:H4 referred to as LB2266992 or strain TY-2482 and not detecting a HUSEC41 strain comprising:
a) isolating nucleic acid from a sample to obtain sample nucleic acid;
c) hybridizing the sample nucleic acid with at least a first pair of polynucleotide primers comprising a forward primer having SEQ ID NO: 26 and a reverse primer having SEQ ID NO: 47;
d) amplifying the first target nucleic acid sequence to form a first amplified target nucleic acid sequence product; and
e) detecting the at least first amplified target nucleic acid sequence product,
wherein detection of the at least first amplified target nucleic acid sequence product is indicative of the presence of E. coli O104:H4 referred to as LB2266992 or strain TY-2482 and is indicative of the absence of the HUSEC41 strain in the sample; and
optionally wherein the detection may comprise using a probe having SEQ ID NO: 68 to hybridize to and thereby detect the first amplified target nucleic acid sequence product.
